(19) United States
(12) Patent Application Publication
(10) Pub. No.: US 2014/0377839 A1
(43) Pub. Date: Dec. 25, 2014

(54) MONOATOMIC POINT MUTANT ARTIFICIAL OXIDOREDUCTASES

(71) Applicant: Aron S. Workman, Gainesville, FL (US)

(72) Inventor: Aron S. Workman, Gainesville, FL (US)

(21) Appl. No.: 13/924,451

(22) Filed: Jun. 21, 2013

(51) Int. Cl. C12N 9/02

(52) U.S. Cl. CPC C12N 9/0089
USPC 435/189

(57) ABSTRACT

This invention in biotechnology/bioinformatics claims artificial mutant polypeptides of an oxidoreductase wherein the wild-type (unmutated) oxidoreductase is human catalase (hcat), a superoxide dismutase isoenzyme of superoxide dismutase 2 (hsod2) or superoxide dismutase 3 (hsod3), or a human glutathione peroxidase isoenzyme of human glutathione peroxidase 1 isoform 1 (hgpx1-1), human glutathione peroxidase 1 isoform 2 (hgpx1-2), human glutathione peroxidase 2 (hgpx2), or human glutathione peroxidase 3 (hgpx3). Disclosed in the specification are the methods by which the monoatomic point mutant libraries have been constructed, and the claimed oxidoreductase polypeptides' encoding nucleic acids and recombinant cells thereof. The monoatomic point mutant method generates artificial polypeptides with altered function whilst limiting primary structural obfuscation. The claimed products have multiple potential industrial applications including as novel therapeutics and industrial catalysts.

### CROSS-REFERENCE TO RELATED APPLICATIONS

[0001] Priority is claimed from U.S. provisional application Ser. No. 61/662,605, filed 21 Jun. 2012.

### BACKGROUND OF THE INVENTION

[0002] This invention pertains to molecular biology. More specifically, this invention pertains to mutant oxidoreductase polypeptides.

[0003] Oxidoreductases are polypeptides that catalyze electron transfer. Electrons are the reactive component of reactive oxygenated species (ROS) and many oxidoreductases are also antioxidants.

[0004] Antioxidants are historical therapeutics that attenuate inflammation. Oxidoreductases may also be utilized to catalyze industrial reactions. Thus there is interest in developing oxidoreductases with improved industrial properties.

[0005] One method of improving industrial properties of polypeptides is to introduce site-specific mutations. An artificial point mutation is the act of substituting a natural peptide residue for an artificial one.

[0006] Some methods by which introduced mutations have been chosen include analogy, homology, understanding of the polypeptide/polypeptide system, or from structure-function studies.

[0007] Multitudinous published and issued U.S. patents claim such mutations and methods.

### BRIEF SUMMARY OF THE INVENTION

[0008] Oxidoreductases were systematically mutated by generating monoatomic point mutant (MPM) libraries.

[0009] A MPM is one in which the resultant residue differs by only a single atom excluding hydrogen atoms.

[0010] The Glu/Gln and Asp/Asn MPM pairs were applied to the oxidoreductases hcat; superoxide dismutase isoenzymes hsod2 and hsod3; and glutathione peroxidase isoenzymes hgpx1-1, hgpx1-2, hgpx2, and hgpx3.

### BRIEF DESCRIPTION OF THE DRAWING

[0011] FIG. 1 shows the primary residue structures of the defined MPM pairs Glu/Gln and Asp/Asn by stick (cartoon) illustration.

### DETAILED DESCRIPTION OF THE INVENTION

[0012] The present invention uses terms of the art including “nucleic acid”, “polynucleotide”, “wild-type”, “recombinant”, “isoenzyme”, “isoform”, “transgenic”, “variant”, “residue”, “mutant”, “mutation”, “substitution”, “oxidoreductase”, “primary”, “primary structure”, and etcetera. These terms are widely used and understood in the fields of biochemistry and molecular biology (Setubal C & Meidanis J (1997) Introduction to Computational Molecular Biology, PWS Publishing, pp 320; Karp G (2007) Cell and Molecular Biology: Concepts and Experiments, Wiley, pp 864; Sambrook J (2001) Molecular Cloning: A Laboratory Manual, Cold Spring Harbor Laboratory Press, pp 999).

[0013] “Nucleic acid” or “polynucleotides” refer to either DNA or RNA, or both DNA and RNA. A “biomolecule” refers to both the nucleic acid and polypeptide products of a single molecule definable by its polypeptide sequence according to central dogma; that is, a polypeptide and all its encoding nucleic acids.

[0014] While “isoenzyme” and “isoform” are sometimes colloquially interchangeable or ambiguous terms, herein “isoenzymes” refer to polypeptides that catalyze an identical net reaction but with differing sequence generated from differing nucleic acid, whereas “isoform” refers to a polypeptide with an identical net reaction and shared sequence domains from shared nucleic acid. Differing sequences of isoenzymes of course do not necessarily preclude homological or otherwise comparable sequence domains.

[0015] “Artificial” refers to a non-naturally occurring polypeptide or nucleic acid; that is, a biomolecule that was not previously a facet of nature before introduction by invented human methods.

[0016] There are differing standards of polypeptide nomenclature and residue assignment.

[0017] Differing nomenclature occurs throughout the normal process of polypeptide discovery that in no way affects physical polypeptide or nucleic acid sequence.

[0018] Differing residue assignments are historical artifacts that vary based on conventions or standards specific to each polypeptide.

[0019] One origin of differing residue assignments is that different synthetic systems (both natural or by human invention) may or may not cleave or include the N-terminal methionine. In identifying polypeptide residues, residue number N-1 is residue number N if the N-terminal methionine is included in the sequence representation. This assignment is not to be confused with the physical sequence: many translated biomolecules begin with the start codon N-terminal methionine, but not all sequence assignments explicate this (for example, the N-terminal methionine may, if pertinent, be assigned residue 0). For example, the residue Glu38 is Glu39 if the N-terminal methionine is included. For consistency, sequences here are listed without the N-terminal methionine. That sequence is included in and contained by either standard sequence.

[0020] A single atom substitution mutant, or monoatomic point mutant (MPM) (or plural: MPMs) polypeptide is mutation wherein a single atom (or atoms) change per mutant residue excepting hydrogen atoms. For example, Cys to Sec is an MPM because the net mutation is the substitution of a sulfur atom for a selenium atom with all other atoms held identical, and conversely Sec to Cys is selenium to sulfur. Every MPM has a converse, and these two mutations are together called an MPM pair, identified by residue, for example the MPM pair Sec/Cys.

[0021] Hydrogen atoms are not included in MPM designations because their presence is largely dependent on the acidity/basicity (solvated hydrogen ion concentrations or pH) of the milieu, and thus vary from polypeptide to polypeptide and from milieu to milieu.

[0022] (During the course of discussion on MPM and MPMs polypeptides, the identifier ‘polypeptide’ may be omitted for clarity).

[0023] Some other MPM types are: Asp to Asn (oxygen to nitrogen) and its converse Asn to Asp (nitrogen to oxygen); and Glu to Gln (oxygen to nitrogen) and its converse Gln to Glu (nitrogen to oxygen).

[0024] While an MPM is a single atom substitution within a single residue, a single polypeptide may contain multiple MPM substitutions at different residues (MPMs). For example, while a polypeptide containing three Cys to Sec MPM residues is a polymutant polypeptide (also called a compound mutant polypeptide), it is also (and more specifically) a MPMs polypeptide.

[0025] Note the scale on which mutation is discussed. For example, a polymutant may more generally refer to an organism or system with multiple distinct mutant polypeptides, but in the instances disclosed herein clearly refers to multiple mutations within a single polypeptide. Like other chemical descriptions, graphical representations greatly alleviate the lexical burden associated with describing such systems. See FIG. 1 for a graphic of the MPM pairs Glu/Gln and Asp/Asn.

[0026] MPM polypeptides are useful because they are as a group the least primary structurally disruptive mutant variants available. Thus MPM libraries, or sets of MPM and MPMs variants of a particular polypeptide, allow screening and analysis of a particular polypeptide's least primary structurally disruptive mutant variants.

[0027] Minimizing structural disruption in mutant polypeptide screening is advantageous because polypeptides evolve precise structures that are sensitive to structural disruption. Particular point mutant residues are known to destabilize, inactivate, or otherwise incapacitate particular polypeptides, especially if these mutants initiate large steric or electronic changes in the polypeptide.

[0028] For example, the MPM Cys to Sec affects the polypeptide's primary structure much less than a Cys to Pro or Cys to Trp mutation at the same residue, in part because the MPM is a significantly more limited steric and electronic change.

[0029] Thus it is posited that an MPM is the most primary incremental point mutation available. This is not obvious because of other similarities between variants that are not MPM. For example, to minimize structural disruption to a Cys residue researchers and technologists often opt for the Cys to Met mutant, a non-MPM, because both residues contain sulfur. The Cys to Met mutant has a net introduction of two carbon atoms excluding hydrogen atoms.

[0030] For the MPM pairs claimed, both Glu and Asp contribute negative electric charge to the polypeptide whereas both Gln and Asn are electrically neutral. These MPM pairs allow changing the electrical properties of a polypeptide with minimal structural obfuscation, which often generate advantageous industrial properties.

[0031] Each polypeptide claimed pertains to molecular biology. More specifically, each polypeptide claimed is an oxidoreductase polypeptide. Each polypeptide is also entirely artificial: the correspondingly mentioned “wild-type (unmutated)” sequence is simply a reference for organization of sequences.

[0032] Human superoxide dismutase isoenzymes (Enzyme Commission number 1.15.1.1) are oxidoreductase polypeptides that are thought to primarily catalyze the reaction: 2 O₂⁻+2 H⁺→O₂+H₂O₂. Superoxide dismutase 2 (hsod2) and superoxide dismutase 3 (hsod3) are examples of human superoxide dismutase isoenzymes.

[0033] Human catalase (hcat) (Enzyme Commission number 1.11.1.6) is an oxidoreductase polypeptide that is thought to primarily catalyze the reaction: 2 H₂O₂→2 H₂O+O₂.

[0034] Human glutathione peroxidase isoenzymes (Enzyme Commission number 1.11.1.9) are selenium-containing oxidoreductase polypeptides that are thought to primarily catalyze the reaction: 2 glutathione+H₂O₂→glutathione disulfide+2 H₂O. Glutathione peroxidase 1 isoform 1 (hgpx1-1), glutathione peroxidase 1 isoform 2 (hgpx1-2), glutathione peroxidase 2 (hgpx2), and glutathione peroxidase 3 (hgpx3) are examples of human glutathione peroxidase isoenzymes. Except for five N-terminal amino acids, gpx1-2 is entirely contained in gpx1-1.

[0035] Human thioredoxin, human superoxide reductase, human myeloperoxidase, and human glutathione reductase as sequence listed are other oxidoreductase polypeptides, both known isoenzymes and without known isoenzymes, that are thought to primarily catalyze oxidoreductive reactions.

[0036] It is possible to generate the artificial nucleic acid sequences encoding the artificial polypeptide sequences by consulting published codon tables of the appropriate organism. Due to codon degeneracy, multitudinous artificial nucleic acid sequences—cDNA, plasmid, and otherwise—may encode one polypeptide product. While the encoding nucleic acids and resultant polypeptide are often seen as a single biomolecular entity, when nucleic acid are necessarily claimed they are identified by their resultant polypeptide product. The polypeptide may then be translated back to nucleic acids, or the nucleic acids translated to polypeptide, to discover infringement. This is a trivial translation for one skilled in the art.

[0037] Transformation/transfection of encoding nucleic acid of any number of cells of multitudinous hosts is a trivial procedure for one skilled in the art. Resultant recombinant cells are not limited by species, transformation method, expression levels of any kind, or any other qualifier.

[0038] Methods of use, synthesis, and purification may or may not vary for each of the claimed products. Generally, the claimed products are being developed as viable recombinant therapeutics and to catalyze industrial (especially radical-mediated) reactions. Oxidoreductase (and antioxidant) therapeutics are, as a historical matter, particularly efficacious for the treatment of inflammation.

[0039] Without further elaboration, it is believed that one skilled in the art can, using the disclosed method (or mutant identities), utilize the present invention and its best mode to its fullest extent. The following specific embodiments are therefore merely illustrative and are not limitative of the remainder of the disclosure or claims in any way whatsoever:

### EXAMPLE 1

### Preparation of MPM Library

[0040] Wild-type sequence data were obtained and aligned for validity from multiple public sources.

[0041] To acquire the MPM library with least human error, a simple Perl script was written and executed from console. The regular expression was changed to generate mutant sequences with start codon M included or from base sequences that included special characters. The script was run for each MPM type. Generation of all possible MPMs is possible by sequential mutation or modified script.

[0042] A functional Perl script in its entirety is:

open INPUT, $ARGV[0] or die $!; my @input =
grep(s/\d//g|s/\R//g|s/\s+//g|s/\hat{ }M//|s/\hat{ }m//, <INPUT>); close INPUT; my ($input) = join(“,
@input); $input = uc($input); open WT, “> wt−$ARGV[0]” or die $!; print WT $input;
close WT; print “Target AA: ”; my $char = <STDIN>; chomp $char; $char = uc($char);
exit 0 if ($char eq “”); print “Mutant AA: ”; my $opchar = <STDIN>; chomp $opchar;
$opchar = uc($opchar); exit 0 if ($opchar eq “”); my $length = length($input); print
“Generating $char to $opchar mutants for $ARGV[0] ($length residues)\n”; my $offset =
0; my $result = index($input, $char, $offset); while ($result != −1) { my $input0 = $input;
my $result1 = $result + 1; my $first = substr($input, 0, $result); my $point =
substr($input0, $result, 1) = $opchar; my $second = substr($input, $result1, $length);
my $opstring = $first.$point.$second; open OUTPUT, “> $char$result1$opchar−
$ARGV[0]” or die $!; print OUTPUT $opstring; close OUTPUT; print
“$char$result1$opchar−$ARGV[0] \n”; $offset = $result + 1; $result = index($input,
$char, $offset); }

### EXAMPLE 2

### High-Throughput Construction of Purified Plasmid Library Containing Encoded Mutant Genes

[0043] Due to codon degeneracy, many codons encode a single polypeptide. Species-specific codon tables such as http://www.kazusa.or.jp/codon/ (Yasukazu Nakamura, Kazusa) were used to construct primary insert structure for each wild-type construct. Secondary and tertiary structures were evaluated for negative expression affect and sequences were adjusted. Each wild-type construct was then cloned into an expression vector plasmid using standard technique. Point mutants were introduced by PCR-directed mutagenesis with a high-proof polymerase and two computationally generated unique primers per mutant. Compound mutants were created step-wise by point mutating each successively purified recombinant nucleic acid or by specialty multi point-mutant methods. Functional plasmid sequences were confirmed by automated sequencing and agarose electrophoresis.

### EXAMPLE 3

### High-Throughput Expression of Purified Plasmid Library and Purification of Expressed Polypeptide Library

[0044] Hosts were transformed with plasmid and incubated. Recombinant lysate was then processed and expressed polypeptides were roughly purified by non-column techniques. Filtrates were assayed by polyacrylamide electrophoresis followed by polypeptide staining.

### EXAMPLE 4

### High-Throughput Evaluation of Artificial Oxidoreductase Library for Activity and Other Industrial Properties

[0045] Polypeptides were assayed in 24-well plates for their respective reactions by spectrophotometry. Inclusion formation and solubilization were assayed by high-throughput methods.

1. An artificial mutant oxidoreductase polypeptide wherein the wild-type (unmutated) polypeptide is a human superoxide dismutase isoenzyme of superoxide dismutase 2 (hsod2) or superoxide dismutase 3 (hsod3) with a polypeptide sequence that is at least 70% identical to SEQ ID NO:1 or SEQ ID NO:2, said polypeptide having one or more mutations selected from the groups consisting of:
a. A substitution of Glu for Gln;
b. A substitution of Gln for Glu;
c. A substitution of Asp for Asn; and
d. A substitution of Asn for Asp.

2. An artificial mutant oxidoreductase polypeptide wherein the wild-type (unmutated) polypeptide is a human catalase (hcat) polypeptide with a polypeptide sequence that is at least 70% identical to SEQ ID NO:3, said polypeptide having one or more mutations selected from the groups consisting of:
a. A substitution of Glu for Gln;
b. A substitution of Gln for Glu;
c. A substitution of Asp for Asn; and
d. A substitution of Asn for Asp.

3. An artificial mutant oxidoreductase polypeptide wherein the wild-type (unmutated) polypeptide is a human glutathione peroxidase isoenzyme of glutathione peroxidase 1 isoform 1 (hgpx1-1) or glutathione peroxidase 1 isoform 2 (hgpx1-2) or glutathione peroxidase 2 (hgpx2) or glutathione peroxidase 3 (hgpx3) with a polypeptide sequence that is at least 70% identical to SEQ ID NO:4 or SEQ ID NO:5 or SEQ ID NO:6 or SEQ ID NO:7, said polypeptide having one or more mutations selected from the groups consisting of:
a. A substitution of Glu for Gln;
b. A substitution of Gln for Glu;
c. A substitution of Asp for Asn; and
d. A substitution of Asn for Asp.

4. A composition comprising the polypeptide of claim 1.

5. A composition comprising the polypeptide of claim 2.

6. A composition comprising the polypeptide of claim 3.

The application's sequence listing, which the Patent Office published only in electronic form, follows.

SEQUENCE LISTING (341 sequences)

SEQ ID NO: 1 - protein, 139 aa, Homo sapiens
LSRAVCGTSRQLAPALGYLGSRQKHSLPDLPYDYGALEPHINAQIMQLHHSKHHAAYVNNLNVTEEKYQEALAKGRFQAERREAVPGRGDPREPGPIRTGLSVEENSLRICTGSEFSRHDSLSFKHMVYLIVEGVPRWV

SEQ ID NO: 2 - protein, 239 aa, Homo sapiens
LALLCSCLLLAAGASDAWTGEDSAEPNSDSAEWIRDMYAKVTEIWQEVMQRRDDDGTLHAACQVQPSATLDAAQPRVTGVVLFRQLAPRAKLDAFFALEGFPTEPNSSSRAIHVHQFGDLSQGCESTGPHYNPLAVPHPQHPGDFGNFAVRDGSLWRYRAGLAASLAGPHSIVGRAVVVHAGEDDLGRGGNQASVENGNAGRRLACCVVGVCGPGLWERQAREHSERKKRRRESECKAA

SEQ ID NO: 3 - protein, 524 aa, Homo sapiens
ADSRDPASDQMQHWKEQRAAQKADVLTTGAGNPVGDKLNVITVGPRGPLLVQDVVFTDEAHFDRERIPERVVHAKGAGAFGYFEVTHDITKYSKAKVFEHIGKKTPIAVRFSTVAGESGSADTVRDPRGFAVKFYTEDGNWDLVGNNTPIFFIRDPILFPSFIHSQKRNPQTHLKDPDVWDFWSLRPESLHQVSFLFSDRGIPDGHRHMNGYGSHTFKLVNANGEAVYCKFHYKTDQGIKNLSVEDAARLSQEDPDYGIRDLFNAIATGKYPSWTFYIQVMTFNQAETFPFNPFDLTKVWPHKDYPLIPVGKLVLNRNPVNYFAEVEQIAFDPSNMPPGIEASPDKMLQGRLFAYPDTHRHRLGPNYLHIPVNCPYRARVANYQRDGPMCMQDNQGGAPNYYPNSFGAPEQQPSALEHSIQYSGEVRRFNTANDDNVTQVRAFYVNVLNEEQRKRLCENIAGHLKDAQIFIQKKAVKNFTEVHPDYGSHIQALLDKYNAEKPKNAIHTFVQSGSHLAAREKANL

SEQ ID NO: 4 - protein, 202 aa, Homo sapiens
  BINDING (48)..(48): Selenium
  SITE (48)..(48): Amino acid at position 48 is selenocysteine (Sec)
CAARLAAAAAAAQSVYAFSARPLAGGEPVSLGSLRGKVLLIENVASLXGTTVRDYTQMNELQRRLGPRGLVVLGFPCNQFGHQENAKNEEILNSLKYVRPGGGFEPNFMLFEKCEVNGAGAHPLFAFLREALPAPSDDATALMTDPKLITWSPVCRNDVAWNFEKFLVGPDGVPLRRYSRRFQTIDIEPDIEALLSQGPSCA

SEQ ID NO: 5 - protein, 97 aa, Homo sapiens
  BINDING (48)..(48): Selenium
  SITE (48)..(48): Amino acid at position 48 is selenocysteine (Sec)
CAARLAAAAAAAQSVYAFSARPLAGGEPVSLGSLRGKVLLIENVASLXGTTVRDYTQMNELQRRLGPRGLVVLGFPCNQFGHQVRRAERGGAGADVQ

SEQ ID NO: 6 - protein, 189 aa, Homo sapiens
  BINDING (39)..(39): Selenium
  SITE (39)..(39): Amino acid at position 39 is selenocysteine (Sec)
AFIAKSFYDLSAISLDGEKVDFNTFRGRAVLIENVASLXGTTTRDFTQLNELQCRFPRRLVVLGFPCNQFGHQENCQNEEILNSLKYVRPGGGYQPTFTLVQKCEVNGQNEHPVFAYLKDKLPYPYDDPFSLMTDPKLIIWSPVRRSDVAWNFEKFLIGPEGEPFRRYSRTFPTINIEPDIKRLLKVAI

SEQ ID NO: 7 - protein, 225 aa, Homo sapiens
  BINDING (72)..(72): Selenium
  SITE (72)..(72): Amino acid at position 72 is selenocysteine (Sec)
ARLLQASCLLSLLLAGFVSQSRGQEKSKMDCHGGISGTIYEYGALTIDGEEYIPFKQYAGKYVLFVNVASYXGLTGQYIELNALQEELAPFGLVILGFPCNQFGKQEPGENSEILPTLKYVRPGGGFVPNFQLFEKGDVNGEKEQKFYTFLKNSCPPTSELLGTSDRLFWEPMKVHDIRWNFEKFLVGPDGIPIMRWHHRTTVSNVKMDILSYMRRQAALGVKRK

SEQ ID NO: 8 - protein, 139 aa, Artificial Sequence
  Artificial mutant polypeptide
  MUTAGEN (38)..(38)
LSRAVCGTSRQLAPALGYLGSRQKHSLPDLPYDYGALQPHINAQIMQLHHSKHHAAYVNNLNVTEEKYQEALAKGRFQAERREAVPGRGDPREPGPIRTGLSVEENSLRICTGSEFSRHDSLSFKHMVYLIVEGVPRWV

SEQ ID NO: 9 - protein, 139 aa, Artificial Sequence
  Artificial mutant polypeptide
  MUTAGEN (65)..(65)
LSRAVCGTSRQLAPALGYLGSRQKHSLPDLPYDYGALEPHINAQIMQLHHSKHHAAYVNNLNVTQEKYQEALAKGRFQAERREAVPGRGDPREPGPIRTGLSVEENSLRICTGSEFSRHDSLSFKHMVYLIVEGVPRWV

SEQ ID NO: 10 - protein, 139 aa, Artificial Sequence
  Artificial mutant polypeptide
  MUTAGEN (66)..(66)
LSRAVCGTSRQLAPALGYLGSRQKHSLPDLPYDYGALEPHINAQIMQLHHSKHHAAYVNNLNVTEQKYQEALAKGRFQAERREAVPGRGDPREPGPIRTGLSVEENSLRICTGSEFSRHDSLSFKHMVYLIVEGVPRWV

SEQ ID NO: 11 - protein, 139 aa, Artificial Sequence
  Artificial mutant polypeptide
  MUTAGEN (70)..(70)
LSRAVCGTSRQLAPALGYLGSRQKHSLPDLPYDYGALEPHINAQIMQLHHSKHHAAYVNNLNVTEEKYQQALAKGRFQAERREAVPGRGDPREPGPIRTGLSVEENSLRICTGSEFSRHDSLSFKHMVYLIVEGVPRWV

SEQ ID NO: 12 - protein, 139 aa, Artificial Sequence
  Artificial mutant polypeptide
  MUTAGEN (80)..(80)
LSRAVCGTSRQLAPALGYLGSRQKHSLPDLPYDYGALEPHINAQIMQLHHSKHHAAYVNNLNVTEEKYQEALAKGRFQAQRREAVPGRGDPREPGPIRTGLSVEENSLRICTGSEFSRHDSLSFKHMVYLIVEGVPRWV

SEQ ID NO: 13 - protein, 139 aa, Artificial Sequence
  Artificial mutant polypeptide
  MUTAGEN (83)..(83)
LSRAVCGTSRQLAPALGYLGSRQKHSLPDLPYDYGALEPHINAQIMQLHHSKHHAAYVNNLNVTEEKYQEALAKGRFQAERRQAVPGRGDPREPGPIRTGLSVEENSLRICTGSEFSRHDSLSFKHMVYLIVEGVPRWV

SEQ ID NO: 14 - protein, 139 aa, Artificial Sequence
  Artificial mutant polypeptide
  MUTAGEN (93)..(93)
LSRAVCGTSRQLAPALGYLGSRQKHSLPDLPYDYGALEPHINAQIMQLHHSKHHAAYVNNLNVTEEKYQEALAKGRFQAERREAVPGRGDPRQPGPIRTGLSVEENSLRICTGSEFSRHDSLSFKHMVYLIVEGVPRWV

SEQ ID NO: 15 - protein, 139 aa, Artificial Sequence
  Artificial mutant polypeptide
  MUTAGEN (104)..(104)
LSRAVCGTSRQLAPALGYLGSRQKHSLPDLPYDYGALEPHINAQIMQLHHSKHHAAYVNNLNVTEEKYQEALAKGRFQAERREAVPGRGDPREPGPIRTGLSVQENSLRICTGSEFSRHDSLSFKHMVYLIVEGVPRWV

SEQ ID NO: 16 - protein, 139 aa, Artificial Sequence
  Artificial mutant polypeptide
  MUTAGEN (105)..(105)
LSRAVCGTSRQLAPALGYLGSRQKHSLPDLPYDYGALEPHINAQIMQLHHSKHHAAYVNNLNVTEEKYQEALAKGRFQAERREAVPGRGDPREPGPIRTGLSVEQNSLRICTGSEFSRHDSLSFKHMVYLIVEGVPRWV

SEQ ID NO: 17 - protein, 139 aa, Artificial Sequence
  Artificial mutant polypeptide
  MUTAGEN (115)..(115)
LSRAVCGTSRQLAPALGYLGSRQKHSLPDLPYDYGALEPHINAQIMQLHHSKHHAAYVNNLNVTEEKYQEALAKGRFQAERREAVPGRGDPREPGPIRTGLSVEENSLRICTGSQFSRHDSLSFKHMVYLIVEGVPRWV

SEQ ID NO: 18 - protein, 139 aa, Artificial Sequence
  Artificial mutant polypeptide
  MUTAGEN (133)..(133)
LSRAVCGTSRQLAPALGYLGSRQKHSLPDLPYDYGALEPHINAQIMQLHHSKHHAAYVNNLNVTEEKYQEALAKGRFQAERREAVPGRGDPREPGPIRTGLSVEENSLRICTGSEFSRHDSLSFKHMVYLIVQGVPRWV

SEQ ID NO: 19 - protein, 139 aa, Artificial Sequence
  Artificial mutant polypeptide
  MUTAGEN (11)..(11)
LSRAVCGTSRELAPALGYLGSRQKHSLPDLPYDYGALEPHINAQIMQLHHSKHHAAYVNNLNVTEEKYQEALAKGRFQAERREAVPGRGDPREPGPIRTGLSVEENSLRICTGSEFSRHDSLSFKHMVYLIVEGVPRWV

SEQ ID NO: 20 - protein, 139 aa, Artificial Sequence
  Artificial mutant polypeptide
  MUTAGEN (23)..(23)
LSRAVCGTSRQLAPALGYLGSREKHSLPDLPYDYGALEPHINAQIMQLHHSKHHAAYVNNLNVTEEKYQEALAKGRFQAERREAVPGRGDPREPGPIRTGLSVEENSLRICTGSEFSRHDSLSFKHMVYLIVEGVPRWV

SEQ ID NO: 21 - protein, 139 aa, Artificial Sequence
  Artificial mutant polypeptide
  MUTAGEN (44)..(44)
LSRAVCGTSRQLAPALGYLGSRQKHSLPDLPYDYGALEPHINAEIMQLHHSKHHAAYVNNLNVTEEKYQEALAKGRFQAERREAVPGRGDPREPGPIRTGLSVEENSLRICTGSEFSRHDSLSFKHMVYLIVEGVPRWV

SEQ ID NO: 22 - protein, 139 aa, Artificial Sequence
  Artificial mutant polypeptide
  MUTAGEN (47)..(47)
LSRAVCGTSRQLAPALGYLGSRQKHSLPDLPYDYGALEPHINAQIMELHHSKHHAAYVNNLNVTEEKYQEALAKGRFQAERREAVPGRGDPREPGPIRTGLSVEENSLRICTGSEFSRHDSLSFKHMVYLIVEGVPRWV

SEQ ID NO: 23 - protein, 139 aa, Artificial Sequence
  Artificial mutant polypeptide
  MUTAGEN (69)..(69)
LSRAVCGTSRQLAPALGYLGSRQKHSLPDLPYDYGALEPHINAQIMQLHHSKHHAAYVNNLNVTEEKYEEALAKGRFQAERREAVPGRGDPREPGPIRTGLSVEENSLRICTGSEFSRHDSLSFKHMVYLIVEGVPRWV

SEQ ID NO: 24 - protein, 139 aa, Artificial Sequence
  Artificial mutant polypeptide
  MUTAGEN (78)..(78)
LSRAVCGTSRQLAPALGYLGSRQKHSLPDLPYDYGALEPHINAQIMQLHHSKHHAAYVNNLNVTEEKYQEALAKGRFEAERREAVPGRGDPREPGPIRTGLSVEENSLRICTGSEFSRHDSLSFKHMVYLIVEGVPRWV

SEQ ID NO: 25 - protein, 139 aa, Artificial Sequence
  Artificial mutant polypeptide
  MUTAGEN (29)..(29)
LSRAVCGTSRQLAPALGYLGSRQKHSLPNLPYDYGALEPHINAQIMQLHHSKHHAAYVNNLNVTEEKYQEALAKGRFQAERREAVPGRGDPREPGPIRTGLSVEENSLRICTGSEFSRHDSLSFKHMVYLIVEGVPRWV

SEQ ID NO: 26 - protein, 139 aa, Artificial Sequence
  Artificial mutant polypeptide
  MUTAGEN (33)..(33)
LSRAVCGTSRQLAPALGYLGSRQKHSLPDLPYNYGALEPHINAQIMQLHHSKHHAAYVNNLNVTEEKYQEALAKGRFQAERREAVPGRGDPREPGPIRTGLSVEENSLRICTGSEFSRHDSLSFKHMVYLIVEGVPRWV

SEQ ID NO: 27 - protein, 139 aa, Artificial Sequence
  Artificial mutant polypeptide
  MUTAGEN (90)..(90)
LSRAVCGTSRQLAPALGYLGSRQKHSLPDLPYDYGALEPHINAQIMQLHHSKHHAAYVNNLNVTEEKYQEALAKGRFQAERREAVPGRGNPREPGPIRTGLSVEENSLRICTGSEFSRHDSLSFKHMVYLIVEGVPRWV

SEQ ID NO: 28 - protein, 139 aa, Artificial Sequence
  Artificial mutant polypeptide
  MUTAGEN (120)..(120)
LSRAVCGTSRQLAPALGYLGSRQKHSLPDLPYDYGALEPHINAQIMQLHHSKHHAAYVNNLNVTEEKYQEALAKGRFQAERREAVPGRGDPREPGPIRTGLSVEENSLRICTGSEFSRHNSLSFKHMVYLIVEGVPRWV

SEQ ID NO: 29 - protein, 139 aa, Artificial Sequence
  Artificial mutant polypeptide
  MUTAGEN (42)..(42)
LSRAVCGTSRQLAPALGYLGSRQKHSLPDLPYDYGALEPHIDAQIMQLHHSKHHAAYVNNLNVTEEKYQEALAKGRFQAERREAVPGRGDPREPGPIRTGLSVEENSLRICTGSEFSRHDSLSFKHMVYLIVEGVPRWV

SEQ ID NO: 30 - protein, 139 aa, Artificial Sequence
  Artificial mutant polypeptide
  MUTAGEN (59)..(59)
LSRAVCGTSRQLAPALGYLGSRQKHSLPDLPYDYGALEPHINAQIMQLHHSKHHAAYVDNLNVTEEKYQEALAKGRFQAERREAVPGRGDPREPGPIRTGLSVEENSLRICTGSEFSRHDSLSFKHMVYLIVEGVPRWV

SEQ ID NO: 31 - protein, 139 aa, Artificial Sequence
  Artificial mutant polypeptide
  MUTAGEN (60)..(60)
LSRAVCGTSRQLAPALGYLGSRQKHSLPDLPYDYGALEPHINAQIMQLHHSKHHAAYVNDLNVTEEKYQEALAKGRFQAERREAVPGRGDPREPGPIRTGLSVEENSLRICTGSEFSRHDSLSFKHMVYLIVEGVPRWV

SEQ ID NO: 32 - protein, 139 aa, Artificial Sequence
  Artificial mutant polypeptide
  MUTAGEN (62)..(62)
LSRAVCGTSRQLAPALGYLGSRQKHSLPDLPYDYGALEPHINAQIMQLHHSKHHAAYVNNLDVTEEKYQEALAKGRFQAERREAVPGRGDPREPGPIRTGLSVEENSLRICTGSEFSRHDSLSFKHMVYLIVEGVPRWV

SEQ ID NO: 33 - protein, 139 aa, Artificial Sequence
  Artificial mutant polypeptide
  MUTAGEN (106)..(106)
LSRAVCGTSRQLAPALGYLGSRQKHSLPDLPYDYGALEPHINAQIMQLHHSKHHAAYVNNLNVTEEKYQEALAKGRFQAERREAVPGRGDPREPGPIRTGLSVEEDSLRICTGSEFSRHDSLSFKHMVYLIVEGVPRWV

SEQ ID NO: 34 - protein, 239 aa, Artificial Sequence
  Artificial mutant polypeptide
  MUTAGEN (21)..(21)
LALLCSCLLLAAGASDAWTGQDSAEPNSDSAEWIRDMYAKVTEIWQEVMQRRDDDGTLHAACQVQPSATLDAAQPRVTGVVLFRQLAPRAKLDAFFALEGFPTEPNSSSRAIHVHQFGDLSQGCESTGPHYNPLAVPHPQHPGDFGNFAVRDGSLWRYRAGLAASLAGPHSIVGRAVVVHAGEDDLGRGGNQASVENGNAGRRLACCVVGVCGPGLWERQAREHSERKKRRRESECKAA

SEQ ID NO: 35 - protein, 239 aa, Artificial Sequence
  Artificial mutant polypeptide
  MUTAGEN (25)..(25)
LALLCSCLLLAAGASDAWTGEDSAQPNSDSAEWIRDMYAKVTEIWQEVMQRRDDDGTLHAACQVQPSATLDAAQPRVTGVVLFRQLAPRAKLDAFFALEGFPTEPNSSSRAIHVHQFGDLSQGCESTGPHYNPLAVPHPQHPGDFGNFAVRDGSLWRYRAGLAASLAGPHSIVGRAVVVHAGEDDLGRGGNQASVENGNAGRRLACCVVGVCGPGLWERQAREHSERKKRRRESECKAA

SEQ ID NO: 36 - protein, 239 aa, Artificial Sequence
  Artificial mutant polypeptide
  MUTAGEN (32)..(32)
LALLCSCLLLAAGASDAWTGEDSAEPNSDSAQWIRDMYAKVTEIWQEVMQRRDDDGTLHAACQVQPSATLDAAQPRVTGVVLFRQLAPRAKLDAFFALEGFPTEPNSSSRAIHVHQFGDLSQGCESTGPHYNPLAVPHPQHPGDFGNFAVRDGSLWRYRAGLAASLAGPHSIVGRAVVVHAGEDDLGRGGNQASVENGNAGRRLACCVVGVCGPGLWERQAREHSERKKRRRESECKAA

SEQ ID NO: 37 - protein, 239 aa, Artificial Sequence
  Artificial mutant polypeptide
  MUTAGEN (43)..(43)
LALLCSCLLLAAGASDAWTGEDSAEPNSDSAEWIRDMYAKVTQIWQEVMQRRDDDGTLHAACQVQPSATLDAAQPRVTGVVLFRQLAPRAKLDAFFALEGFPTEPNSSSRAIHVHQFGDLSQGCESTGPHYNPLAVPHPQHPGDFGNFAVRDGSLWRYRAGLAASLAGPHSIVGRAVVVHAGEDDLGRGGNQASVENGNAGRRLACCVVGVCGPGLWERQAREHSERKKRRRESECKAA

SEQ ID NO: 38 - protein, 239 aa, Artificial Sequence
  Artificial mutant polypeptide
  MUTAGEN (47)..(47)
LALLCSCLLLAAGASDAWTGEDSAEPNSDSAEWIRDMYAKVTEIWQQVMQRRDDDGTLHAACQVQPSATLDAAQPRVTGVVLFRQLAPRAKLDAFFALEGFPTEPNSSSRAIHVHQFGDLSQGCESTGPHYNPLAVPHPQHPGDFGNFAVRDGSLWRYRAGLAASLAGPHSIVGRAVVVHAGEDDLGRGGNQASVENGNAGRRLACCVVGVCGPGLWERQAREHSERKKRRRESECKAA

SEQ ID NO: 39 - protein, 239 aa, Artificial Sequence
  Artificial mutant polypeptide
  MUTAGEN (99)..(99)
LALLCSCLLLAAGASDAWTGEDSAEPNSDSAEWIRDMYAKVTEIWQEVMQRRDDDGTLHAACQVQPSATLDAAQPRVTGVVLFRQLAPRAKLDAFFALQGFPTEPNSSSRAIHVHQFGDLSQGCESTGPHYNPLAVPHPQHPGDFGNFAVRDGSLWRYRAGLAASLAGPHSIVGRAVVVHAGEDDLGRGGNQASVENGNAGRRLACCVVGVCGPGLWERQAREHSERKKRRRESECKAA

SEQ ID NO: 40 - protein, 239 aa, Artificial Sequence
  Artificial mutant polypeptide
  MUTAGEN (104)..(104)
LALLCSCLLLAAGASDAWTGEDSAEPNSDSAEWIRDMYAKVTEIWQEVMQRRDDDGTLHAACQVQPSATLDAAQPRVTGVVLFRQLAPRAKLDAFFALEGFPTQPNSSSRAIHVHQFGDLSQGCESTGPHYNPLAVPHPQHPGDFGNFAVRDGSLWRYRAGLAASLAGPHSIVGRAVVVHAGEDDLGRGGNQASVENGNAGRRLACCVVGVCGPGLWERQAREHSERKKRRRESECKAA

SEQ ID NO: 41 - protein, 239 aa, Artificial Sequence
  Artificial mutant polypeptide
  MUTAGEN (125)..(125)
LALLCSCLLLAAGASDAWTGEDSAEPNSDSAEWIRDMYAKVTEIWQEVMQRRDDDGTLHAACQVQPSATLDAAQPRVTGVVLFRQLAPRAKLDAFFALEGFPTEPNSSSRAIHVHQFGDLSQGCQSTGPHYNPLAVPHPQHPGDFGNFAVRDGSLWRYRAGLAASLAGPHSIVGRAVVVHAGEDDLGRGGNQASVENGNAGRRLACCVVGVCGPGLWERQAREHSERKKRRRESECKAA

SEQ ID NO: 42 - protein, 239 aa, Artificial Sequence
  Artificial mutant polypeptide
  MUTAGEN (183)..(183)
LALLCSCLLLAAGASDAWTGEDSAEPNSDSAEWIRDMYAKVTEIWQEVMQRRDDDGTLHAACQVQPSATLDAAQPRVTGVVLFRQLAPRAKLDAFFALEGFPTEPNSSSRAIHVHQFGDLSQGCESTGPHYNPLAVPHPQHPGDFGNFAVRDGSLWRYRAGLAASLAGPHSIVGRAVVVHAGQDDLGRGGNQASVENGNAGRRLACCVVGVCGPGLWERQAREHSERKKRRRESECKAA

SEQ ID NO: 43 - protein, 239 aa, Artificial Sequence
  Artificial mutant polypeptide
  MUTAGEN (196)..(196)
LALLCSCLLLAAGASDAWTGEDSAEPNSDSAEWIRDMYAKVTEIWQEVMQRRDDDGTLHAACQVQPSATLDAAQPRVTGVVLFRQLAPRAKLDAFFALEGFPTEPNSSSRAIHVHQFGDLSQGCESTGPHYNPLAVPHPQHPGDFGNFAVRDGSLWRYRAGLAASLAGPHSIVGRAVVVHAGEDDLGRGGNQASVQNGNAGRRLACCVVGVCGPGLWERQAREHSERKKRRRESECKAA

SEQ ID NO: 44 - protein, 239 aa, Artificial Sequence
  Artificial mutant polypeptide
  MUTAGEN (218)..(218)
LALLCSCLLLAAGASDAWTGEDSAEPNSDSAEWIRDMYAKVTEIWQEVMQRRDDDGTLHAACQVQPSATLDAAQPRVTGVVLFRQLAPRAKLDAFFALEGFPTEPNSSSRAIHVHQFGDLSQGCESTGPHYNPLAVPHPQHPGDFGNFAVRDGSLWRYRAGLAASLAGPHSIVGRAVVVHAGEDDLGRGGNQASVENGNAGRRLACCVVGVCGPGLWQRQAREHSERKKRRRESECKAA

SEQ ID NO: 45 - protein, 239 aa, Artificial Sequence
  Artificial mutant polypeptide
  MUTAGEN (223)..(223)
LALLCSCLLLAAGASDAWTGEDSAEPNSDSAEWIRDMYAKVTEIWQEVMQRRDDDGTLHAACQVQPSATLDAAQPRVTGVVLFRQLAPRAKLDAFFALEGFPTEPNSSSRAIHVHQFGDLSQGCESTGPHYNPLAVPHPQHPGDFGNFAVRDGSLWRYRAGLAASLAGPHSIVGRAVVVHAGEDDLGRGGNQASVENGNAGRRLACCVVGVCGPGLWERQARQHSERKKRRRESECKAA

SEQ ID NO: 46 - protein, 239 aa, Artificial Sequence
  Artificial mutant polypeptide
  MUTAGEN (226)..(226)
LALLCSCLLLAAGASDAWTGEDSAEPNSDSAEWIRDMYAKVTEIWQEVMQRRDDDGTLHAACQVQPSATLDAAQPRVTGVVLFRQLAPRAKLDAFFALEGFPTEPNSSSRAIHVHQFGDLSQGCESTGPHYNPLAVPHPQHPGDFGNFAVRDGSLWRYRAGLAASLAGPHSIVGRAVVVHAGEDDLGRGGNQASVENGNAGRRLACCVVGVCGPGLWERQAREHSQRKKRRRESECKAA

SEQ ID NO: 47 - protein, 239 aa, Artificial Sequence
  Artificial mutant polypeptide
  MUTAGEN (233)..(233)
LALLCSCLLLAAGASDAWTGEDSAEPNSDSAEWIRDMYAKVTEIWQEVMQRRDDDGTLHAACQVQPSATLDAAQPRVTGVVLFRQLAPRAKLDAFFALEGFPTEPNSSSRAIHVHQFGDLSQGCESTGPHYNPLAVPHPQHPGDFGNFAVRDGSLWRYRAGLAASLAGPHSIVGRAVVVHAGEDDLGRGGNQASVENGNAGRRLACCVVGVCGPGLWERQAREHSERKKRRRQSECKAA

SEQ ID NO: 48 - protein, 239 aa, Artificial Sequence
  Artificial mutant polypeptide
  MUTAGEN (235)..(235)
LALLCSCLLLAAGASDAWTGEDSAEPNSDSAEWIRDMYAKVTEIWQEVMQRRDDDGTLHAACQVQPSATLDAAQPRVTGVVLFRQLAPRAKLDAFFALEGFPTEPNSSSRAIHVHQFGDLSQGCESTGPHYNPLAVPHPQHPGDFGNFAVRDGSLWRYRAGLAASLAGPHSIVGRAVVVHAGEDDLGRGGNQASVENGNAGRRLACCVVGVCGPGLWERQAREHSERKKRRRESQCKAA

SEQ ID NO: 49 - protein, 239 aa, Artificial Sequence
  Artificial mutant polypeptide
  MUTAGEN (46)..(46)
LALLCSCLLLAAGASDAWTGEDSAEPNSDSAEWIRDMYAKVTEIWEEVMQRRDDDGTLHAACQVQPSATLDAAQPRVTGVVLFRQLAPRAKLDAFFALEGFPTEPNSSSRAIHVHQFGDLSQGCESTGPHYNPLAVPHPQHPGDFGNFAVRDGSLWRYRAGLAASLAGPHSIVGRAVVVHAGEDDLGRGGNQASVENGNAGRRLACCVVGVCGPGLWERQAREHSERKKRRRESECKAA

SEQ ID NO: 50 - protein, 239 aa, Artificial Sequence
  Artificial mutant polypeptide
  MUTAGEN (50)..(50)
LALLCSCLLLAAGASDAWTGEDSAEPNSDSAEWIRDMYAKVTEIWQEVMERRDDDGTLHAACQVQPSATLDAAQPRVTGVVLFRQLAPRAKLDAFFALEGFPTEPNSSSRAIHVHQFGDLSQGCESTGPHYNPLAVPHPQHPGDFGNFAVRDGSLWRYRAGLAASLAGPHSIVGRAVVVHAGEDDLGRGGNQASVENGNAGRRLACCVVGVCGPGLWERQAREHSERKKRRRESECKAA

SEQ ID NO: 51 - protein, 239 aa, Artificial Sequence
  Artificial mutant polypeptide
  MUTAGEN (63)..(63)
LALLCSCLLLAAGASDAWTGEDSAEPNSDSAEWIRDMYAKVTEIWQEVMQRRDDDGTLHAACEVQPSATLDAAQPRVTGVVLFRQLAPRAKLDAFFALEGFPTEPNSSSRAIHVHQFGDLSQGCESTGPHYNPLAVPHPQHPGDFGNFAVRDGSLWRYRAGLAASLAGPHSIVGRAVVVHAGEDDLGRGGNQASVENGNAGRRLACCVVGVCGPGLWERQAREHSERKKRRRESECKAA

SEQ ID NO: 52 - protein, 239 aa, Artificial Sequence
  Artificial mutant polypeptide
  MUTAGEN (65)..(65)
LALLCSCLLLAAGASDAWTGEDSAEPNSDSAEWIRDMYAKVTEIWQEVMQRRDDDGTLHAACQVEPSATLDAAQPRVTGVVLFRQLAPRAKLDAFFALEGFPTEPNSSSRAIHVHQFGDLSQGCESTGPHYNPLAVPHPQHPGDFGNFAVRDGSLWRYRAGLAASLAGPHSIVGRAVVVHAGEDDLGRGGNQASVENGNAGRRLACCVVGVCGPGLWERQAREHSERKKRRRESECKAA

SEQ ID NO: 53 - protein, 239 aa, Artificial Sequence
  Artificial mutant polypeptide
  MUTAGEN (74)..(74)
LALLCSCLLLAAGASDAWTGEDSAEPNSDSAEWIRDMYAKVTEIWQEVMQRRDDDGTLHAACQVQPSATLDAAEPRVTGVVLFRQLAPRAKLDAFFALEGFPTEPNSSSRAIHVHQFGDLSQGCESTGPHYNPLAVPHPQHPGDFGNFAVRDGSLWRYRAGLAASLAGPHSIVGRAVVVHAGEDDLGRGGNQASVENGNAGRRLACCVVGVCGPGLWERQAREHSERKKRRRESECKAA

SEQ ID NO: 54 - protein, 239 aa, Artificial Sequence
  Artificial mutant polypeptide
  MUTAGEN (85)..(85)
LALLCSCLLLAAGASDAWTGEDSAEPNSDSAEWIRDMYAKVTEIWQEVMQRRDDDGTLHAACQVQPSATLDAAQPRVTGVVLFRELAPRAKLDAFFALEGFPTEPNSSSRAIHVHQFGDLSQGCESTGPHYNPLAVPHPQHPGDFGNFAVRDGSLWRYRAGLAASLAGPHSIVGRAVVVHAGEDDLGRGGNQASVENGNAGRRLACCVVGVCGPGLWERQAREHSERKKRRRESECKAA

SEQ ID NO: 55 - protein, 239 aa, Artificial Sequence
  Artificial mutant polypeptide
  MUTAGEN (116)..(116)
LALLCSCLLLAAGASDAWTGEDSAEPNSDSAEWIRDMYAKVTEIWQEVMQRRDDDGTLHAACQVQPSATLDAAQPRVTGVVLFRQLAPRAKLDAFFALEGFPTEPNSSSRAIHVHEFGDLSQGCESTGPHYNPLAVPHPQHPGDFGNFAVRDGSLWRYRAGLAASLAGPHSIVGRAVVVHAGEDDLGRGGNQASVENGNAGRRLACCVVGVCGPGLWERQAREHSERKKRRRESECKAA

SEQ ID NO: 56 - protein, 239 aa, Artificial Sequence
  Artificial mutant polypeptide
  MUTAGEN (122)..(122)
LALLCSCLLLAAGASDAWTGEDSAEPNSDSAEWIRDMYAKVTEIWQEVMQRRDDDGTLHAACQVQPSATLDAAQPRVTGVVLFRQLAPRAKLDAFFALEGFPTEPNSSSRAIHVHQFGDLSEGCESTGPHYNPLAVPHPQHPGDFGNFAVRDGSLWRYRAGLAASLAGPHSIVGRAVVVHAGEDDLGRGGNQASVENGNAGRRLACCVVGVCGPGLWERQAREHSERKKRRRESECKAA

SEQ ID NO: 57 - protein, 239 aa, Artificial Sequence
  Artificial mutant polypeptide
  MUTAGEN (140)..(140)
LALLCSCLLLAAGASDAWTGEDSAEPNSDSAEWIRDMYAKVTEIWQEVMQRRDDDGTLHAACQVQPSATLDAAQPRVTGVVLFRQLAPRAKLDAFFALEGFPTEPNSSSRAIHVHQFGDLSQGCESTGPHYNPLAVPHPEHPGDFGNFAVRDGSLWRYRAGLAASLAGPHSIVGRAVVVHAGEDDLGRGGNQASVENGNAGRRLACCVVGVCGPGLWERQAREHSERKKRRRESECKAA

SEQ ID NO: 58 - protein, 239 aa, Artificial Sequence
  Artificial mutant polypeptide
  MUTAGEN (192)..(192)
LALLCSCLLLAAGASDAWTGEDSAEPNSDSAEWIRDMYAKVTEIWQEVMQRRDDDGTLHAACQVQPSATLDAAQPRVTGVVLFRQLAPRAKLDAFFALEGFPTEPNSSSRAIHVHQFGDLSQGCESTGPHYNPLAVPHPQHPGDFGNFAVRDGSLWRYRAGLAASLAGPHSIVGRAVVVHAGEDDLGRGGNEASVENGNAGRRLACCVVGVCGPGLWERQAREHSERKKRRRESECKAA

SEQ ID NO: 59 - protein, 239 aa, Artificial Sequence
  Artificial mutant polypeptide
  MUTAGEN (220)..(220)
LALLCSCLLLAAGASDAWTGEDSAEPNSDSAEWIRDMYAKVTEIWQEVMQRRDDDGTLHAACQVQPSATLDAAQPRVTGVVLFRQLAPRAKLDAFFALEGFPTEPNSSSRAIHVHQFGDLSQGCESTGPHYNPLAVPHPQHPGDFGNFAVRDGSLWRYRAGLAASLAGPHSIVGRAVVVHAGEDDLGRGGNQASVENGNAGRRLACCVVGVCGPGLWEREAREHSERKKRRRESECKAA

SEQ ID NO: 60 - protein, 239 aa, Artificial Sequence
  Artificial mutant polypeptide
  MUTAGEN (16)..(16)
LALLCSCLLLAAGASNAWTGEDSAEPNSDSAEWIRDMYAKVTEIWQEVMQRRDDDGTLHAACQVQPSATLDAAQPRVTGVVLFRQLAPRAKLDAFFALEGFPTEPNSSSRAIHVHQFGDLSQGCESTGPHYNPLAVPHPQHPGDFGNFAVRDGSLWRYRAGLAASLAGPHSIVGRAVVVHAGEDDLGRGGNQASVENGNAGRRLACCVVGVCGPGLWERQAREHSERKKRRRESECKAA

SEQ ID NO: 61 - protein, 239 aa, Artificial Sequence
  Artificial mutant polypeptide
  MUTAGEN (22)..(22)
LALLCSCLLLAAGASDAWTGENSAEPNSDSAEWIRDMYAKVTEIWQEVMQRRDDDGTLHAACQVQPSATLDAAQPRVTGVVLFRQLAPRAKLDAFFALEGFPTEPNSSSRAIHVHQFGDLSQGCESTGPHYNPLAVPHPQHPGDFGNFAVRDGSLWRYRAGLAASLAGPHSIVGRAVVVHAGEDDLGRGGNQASVENGNAGRRLACCVVGVCGPGLWERQAREHSERKKRRRESECKAA

SEQ ID NO: 62 - protein, 239 aa, Artificial Sequence
  Artificial mutant polypeptide
  MUTAGEN (29)..(29)
LALLCSCLLLAAGASDAWTGEDSAEPNSNSAEWIRDMYAKVTEIWQEVMQRRDDDGTLHAACQVQPSATLDAAQPRVTGVVLFRQLAPRAKLDAFFALEGFPTEPNSSSRAIHVHQFGDLSQGCESTGPHYNPLAVPHPQHPGDFGNFAVRDGSLWRYRAGLAASLAGPHSIVGRAVVVHAGEDDLGRGGNQASVENGNAGRRLACCVVGVCGPGLWERQAREHSERKKRRRESECKAA

SEQ ID NO: 63 - protein, 239 aa, Artificial Sequence
  Artificial mutant polypeptide
  MUTAGEN (36)..(36)
LALLCSCLLLAAGASDAWTGEDSAEPNSDSAEWIRNMYAKVTEIWQEVMQRRDDDGTLHAACQVQPSATLDAAQPRVTGVVLFRQLAPRAKLDAFFALEGFPTEPNSSSRAIHVHQFGDLSQGCESTGPHYNPLAVPHPQHPGDFGNFAVRDGSLWRYRAGLAASLAGPHSIVGRAVVVHAGEDDLGRGGNQASVENGNAGRRLACCVVGVCGPGLWERQAREHSERKKRRRESECKAA

SEQ ID NO: 64 - protein, 239 aa, Artificial Sequence
  Artificial mutant polypeptide
  MUTAGEN (53)..(53)
LALLCSCLLLAAGASDAWTGEDSAEPNSDSAEWIRDMYAKVTEIWQEVMQRRNDDGTLHAACQVQPSATLDAAQPRVTGVVLFRQLAPRAKLDAFFALEGFPTEPNSSSRAIHVHQFGDLSQGCESTGPHYNPLAVPHPQHPGDFGNFAVRDGSLWRYRAGLAASLAGPHSIVGRAVVVHAGEDDLGRGGNQASVENGNAGRRLACCVVGVCGPGLWERQAREHSERKKRRRESECKAA

SEQ ID NO: 65 - protein, 239 aa, Artificial Sequence
  Artificial mutant polypeptide
  MUTAGEN (54)..(54)
LALLCSCLLLAAGASDAWTGEDSAEPNSDSAEWIRDMYAKVTEIWQEVMQRRDNDGTLHAACQVQPSATLDAAQPRVTGVVLFRQLAPRAKLDAFFALEGFPTEPNSSSRAIHVHQFGDLSQGCESTGPHYNPLAVPHPQHPGDFGNFAVRDGSLWRYRAGLAASLAGPHSIVGRAVVVHAGEDDLGRGGNQASVENGNAGRRLACCVVGVCGPGLWERQAREHSERKKRRRESECKAA

SEQ ID NO: 66 - protein, 239 aa, Artificial Sequence
  Artificial mutant polypeptide
  MUTAGEN (55)..(55)
LALLCSCLLLAAGASDAWTGEDSAEPNSDSAEWIRDMYAKVTEIWQEVMQRRDDNGTLHAACQVQPSATLDAAQPRVTGVVLFRQLAPRAKLDAFFALEGFPTEPNSSSRAIHVHQFGDLSQGCESTGPHYNPLAVPHPQHPGDFGNFAVRDGSLWRYRAGLAASLAGPHSIVGRAVVVHAGEDDLGRGGNQASVENGNAGRRLACCVVGVCGPGLWERQAREHSERKKRRRESECKAA

SEQ ID NO: 67 - protein, 239 aa, Artificial Sequence
  Artificial mutant polypeptide
  MUTAGEN (71)..(71)
LALLCSCLLLAAGASDAWTGEDSAEPNSDSAEWIRDMYAKVTEIWQEVMQRRDDDGTLHAACQVQPSATLNAAQPRVTGVVLFRQLAPRAKLDAFFALEGFPTEPNSSSRAIHVHQFGDLSQGCESTGPHYNPLAVPHPQHPGDFGNFAVRDGSLWRYRAGLAASLAGPHSIVGRAVVVHAGEDDLGRGGNQASVENGNAGRRLACCVVGVCGPGLWERQAREHSERKKRRRESECKAA

SEQ ID NO: 68 - protein, 239 aa, Artificial Sequence
  Artificial mutant polypeptide
  MUTAGEN (93)..(93)
LALLCSCLLLAAGASDAWTGEDSAEPNSDSAEWIRDMYAKVTEIWQEVMQRRDDDGTLHAACQVQPSATLDAAQPRVTGVVLFRQLAPRAKLNAFFALEGFPTEPNSSSRAIHVHQFGDLSQGCESTGPHYNPLAVPHPQHPGDFGNFAVRDGSLWRYRAGLAASLAGPHSIVGRAVVVHAGEDDLGRGGNQASVENGNAGRRLACCVVGVCGPGLWERQAREHSERKKRRRESECKAA

SEQ ID NO: 69 - protein, 239 aa, Artificial Sequence
  Artificial mutant polypeptide
  MUTAGEN (119)..(119)
LALLCSCLLLAAGASDAWTGEDSAEPNSDSAEWIRDMYAKVTEIWQEVMQRRDDDGTLHAACQVQPSATLDAAQPRVTGVVLFRQLAPRAKLDAFFALEGFPTEPNSSSRAIHVHQFGNLSQGCESTGPHYNPLAVPHPQHPGDFGNFAVRDGSLWRYRAGLAASLAGPHSIVGRAVVVHAGEDDLGRGGNQASVENGNAGRRLACCVVGVCGPGLWERQAREHSERKKRRRESECKAA

SEQ ID NO: 70 - protein, 239 aa, Artificial Sequence
  Artificial mutant polypeptide
  MUTAGEN (144)..(144)
LALLCSCLLLAAGASDAWTGEDSAEPNSDSAEWIRDMYAKVTEIWQEVMQRRDDDGTLHAACQVQPSATLDAAQPRVTGVVLFRQLAPRAKLDAFFALEGFPTEPNSSSRAIHVHQFGDLSQGCESTGPHYNPLAVPHPQHPGNFGNFAVRDGSLWRYRAGLAASLAGPHSIVGRAVVVHAGEDDLGRGGNQASVENGNAGRRLACCVVGVCGPGLWERQAREHSERKKRRRESECKAA

SEQ ID NO: 71 - protein, 239 aa, Artificial Sequence
  Artificial mutant polypeptide
  MUTAGEN (152)..(152)
LALLCSCLLLAAGASDAWTGEDSAEPNSDSAEWIRDMYAKVTEIWQEVMQRRDDDGTLHAACQVQPSATLDAAQPRVTGVVLFRQLAPRAKLDAFFALEGFPTEPNSSSRAIHVHQFGDLSQGCESTGPHYNPLAVPHPQHPGDFGNFAVRNGSLWRYRAGLAASLAGPHSIVGRAVVVHAGEDDLGRGGNQASVENGNAGRRLACCVVGVCGPGLWERQAREHSERKKRRRESECKAA

SEQ ID NO: 72 - protein, 239 aa, Artificial Sequence
  Artificial mutant polypeptide
  MUTAGEN (184)..(184)
LALLCSCLLLAAGASDAWTGEDSAEPNSDSAEWIRDMYAKVTEIWQEVMQRRDDDGTLHAACQVQPSATLDAAQPRVTGVVLFRQLAPRAKLDAFFALEGFPTEPNSSSRAIHVHQFGDLSQGCESTGPHYNPLAVPHPQHPGDFGNFAVRDGSLWRYRAGLAASLAGPHSIVGRAVVVHAGENDLGRGGNQASVENGNAGRRLACCVVGVCGPGLWERQAREHSERKKRRRESECKAA

SEQ ID NO: 73 - protein, 239 aa, Artificial Sequence
  Artificial mutant polypeptide
  MUTAGEN (185)..(185)
LALLCSCLLLAAGASDAWTGEDSAEPNSDSAEWIRDMYAKVTEIWQEVMQRRDDDGTLHAACQVQPSATLDAAQPRVTGVVLFRQLAPRAKLDAFFALEGFPTEPNSSSRAIHVHQFGDLSQGCESTGPHYNPLAVPHPQHPGDFGNFAVRDGSLWRYRAGLAASLAGPHSIVGRAVVVHAGEDNLGRGGNQASVENGNAGRRLACCVVGVCGPGLWERQAREHSERKKRRRESECKAA

SEQ ID NO: 74 - protein, 239 aa, Artificial Sequence
  Artificial mutant polypeptide
  MUTAGEN (27)..(27)
LALLCSCLLLAAGASDAWTGEDSAEPDSDSAEWIRDMYAKVTEIWQEVMQRRDDDGTLHAACQVQPSATLDAAQPRVTGVVLFRQLAPRAKLDAFFALEGFPTEPNSSSRAIHVHQFGDLSQGCESTGPHYNPLAVPHPQHPGDFGNFAVRDGSLWRYRAGLAASLAGPHSIVGRAVVVHAGEDDLGRGGNQASVENGNAGRRLACCVVGVCGPGLWERQAREHSERKKRRRESECKAA

SEQ ID NO: 75 - protein, 239 aa, Artificial Sequence
  Artificial mutant polypeptide
  MUTAGEN (106)..(106)
LALLCSCLLLAAGASDAWTGEDSAEPNSDSAEWIRDMYAKVTEIWQEVMQRRDDDGTLHAACQVQPSATLDAAQPRVTGVVLFRQLAPRAKLDAFFALEGFPTEPDSSSRAIHVHQFGDLSQGCESTGPHYNPLAVPHPQHPGDFGNFAVRDGSLWRYRAGLAASLAGPHSIVGRAVVVHAGEDDLGRGGNQASVENGNAGRRLACCVVGVCGPGLWERQAREHSERKKRRRESECKAA

SEQ ID NO: 76 - protein, 239 aa, Artificial Sequence
  Artificial mutant polypeptide
  MUTAGEN (132)..(132)
LALLCSCLLLAAGASDAWTGEDSAEPNSDSAEWIRDMYAKVTEIWQEVMQRRDDDGTLHAACQVQPSATLDAAQPRVTGVVLFRQLAPRAKLDAFFALEGFPTEPNSSSRAIHVHQFGDLSQGCESTGPHYDPLAVPHPQHPGDFGNFAVRDGSLWRYRAGLAASLAGPHSIVGRAVVVHAGEDDLGRGGNQASVENGNAGRRLACCVVGVCGPGLWERQAREHSERKKRRRESECKAA

SEQ ID NO: 77 - protein, 239 aa, Artificial Sequence
  Artificial mutant polypeptide
  MUTAGEN (147)..(147)
LALLCSCLLLAAGASDAWTGEDSAEPNSDSAEWIRDMYAKVTEIWQEVMQRRDDDGTLHAACQVQPSATLDAAQPRVTGVVLFRQLAPRAKLDAFFALEGFPTEPNSSSRAIHVHQFGDLSQGCESTGPHYNPLAVPHPQHPGDFGDFAVRDGSLWRYRAGLAASLAGPHSIVGRAVVVHAGEDDLGRGGNQASVENGNAGRRLACCVVGVCGPGLWERQAREHSERKKRRRESECKAA

SEQ ID NO: 78 - protein, 239 aa, Artificial Sequence
  Artificial mutant polypeptide
  MUTAGEN (191)..(191)
LALLCSCLLLAAGASDAWTGEDSAEPNSDSAEWIRDMYAKVTEIWQEVMQRRDDDGTLHAACQVQPSATLDAAQPRVTGVVLFRQLAPRAKLDAFFALEGFPTEPNSSSRAIHVHQFGDLSQGCESTGPHYNPLAVPHPQHPGDFGNFAVRDGSLWRYRAGLAASLAGPHSIVGRAVVVHAGEDDLGRGGDQASVENGNAGRRLACCVVGVCGPGLWERQAREHSERKKRRRESECKAA

SEQ ID NO: 79 - protein, 239 aa, Artificial Sequence
  Artificial mutant polypeptide
  MUTAGEN (197)..(197)
LALLCSCLLLAAGASDAWTGEDSAEPNSDSAEWIRDMYAKVTEIWQEVMQRRDDDGTLHAACQVQPSATLDAAQPRVTGVVLFRQLAPRAKLDAFFALEGFPTEPNSSSRAIHVHQFGDLSQGCESTGPHYNPLAVPHPQHPGDFGNFAVRDGSLWRYRAGLAASLAGPHSIVGRAVVVHAGEDDLGRGGNQASVEDGNAGRRLACCVVGVCGPGLWERQAREHSERKKRRRESECKAA

SEQ ID NO: 80 - protein, 239 aa, Artificial Sequence
  Artificial mutant polypeptide
  MUTAGEN (199)..(199)
LALLCSCLLLAAGASDAWTGEDSAEPNSDSAEWIRDMYAKVTEIWQEVMQRRDDDGTLHAACQVQPSATLDAAQPRVTGVVLFRQLAPRAKLDAFFALEGFPTEPNSSSRAIHVHQFGDLSQGCESTGPHYNPLAVPHPQHPGDFGNFAVRDGSLWRYRAGLAASLAGPHSIVGRAVVVHAGEDDLGRGGNQASVENGDAGRRLACCVVGVCGPGLWERQAREHSERKKRRRESECKAA

SEQ ID NO: 81 - protein, 524 aa, Artificial Sequence
  Artificial mutant polypeptide
  MUTAGEN (16)..(16)
ADSRDPASDQMQHWKQQRAAQKADVLTTGAGNPVGDKLNVITVGPRGPLLVQDVVFTDEAHFDRERIPERVVHAKGAGAFGYFEVTHDITKYSKAKVFEHIGKKTPIAVRFSTVAGESGSADTVRDPRGFAVKFYTEDGNWDLVGNNTPIFFIRDPILFPSFIHSQKRNPQTHLKDPDVWDFWSLRPESLHQVSFLFSDRGIPDGHRHMNGYGSHTFKLVNANGEAVYCKFHYKTDQGIKNLSVEDAARLSQEDPDYGIRDLFNAIATGKYPSWTFYIQVMTFNQAETFPFNPFDLTKVWPHKDYPLIPVGKLVLNRNPVNYFAEVEQIAFDPSNMPPGIEASPDKMLQGRLFAYPDTHRHRLGPNYLHIPVNCPYRARVANYQRDGPMCMQDNQGGAPNYYPNSFGAPEQQPSALEHSIQYSGEVRRFNTANDDNVTQVRAFYVNVLNEEQRKRLCENIAGHLKDAQIFIQKKAVKNFTEVHPDYGSHIQALLDKYNAEKPKNAIHTFVQSGSHLAAREKANL

SEQ ID NO: 82 - protein, 524 aa, Artificial Sequence
  Artificial mutant polypeptide
  MUTAGEN (59)..(59)
ADSRDPASDQMQHWKEQRAAQKADVLTTGAGNPVGDKLNVITVGPRGPLLVQDVVFTDQAHFDRERIPERVVHAKGAGAFGYFEVTHDITKYSKAKVFEHIGKKTPIAVRFSTVAGESGSADTVRDPRGFAVKFYTEDGNWDLVGNNTPIFFIRDPILFPSFIHSQKRNPQTHLKDPDVWDFWSLRPESLHQVSFLFSDRGIPDGHRHMNGYGSHTFKLVNANGEAVYCKFHYKTDQGIKNLSVEDAARLSQEDPDYGIRDLFNAIATGKYPSWTFYIQVMTFNQAETFPFNPFDLTKVWPHKDYPLIPVGKLVLNRNPVNYFAEVEQIAFDPSNMPPGIEASPDKMLQGRLFAYPDTHRHRLGPNYLHIPVNCPYRARVANYQRDGPMCMQDNQGGAPNYYPNSFGAPEQQPSALEHSIQYSGEVRRFNTANDDNVTQVRAFYVNVLNEEQRKRLCENIAGHLKDAQIFIQKKAVKNFTEVHPDYGSHIQALLDKYNAEKPKNAIHTFVQSGSHLAAREKANL

SEQ ID NO: 83 - protein, 524 aa, Artificial Sequence
  Artificial mutant polypeptide
  MUTAGEN (65)..(65)
ADSRDPASDQMQHWKEQRAAQKADVLTTGAGNPVGDKLNVITVGPRGPLLVQDVVFTDEAHFDRQRIPERVVHAKGAGAFGYFEVTHDITKYSKAKVFEHIGKKTPIAVRFSTVAGESGSADTVRDPRGFAVKFYTEDGNWDLVGNNTPIFFIRDPILFPSFIHSQKRNPQTHLKDPDVWDFWSLRPESLHQVSFLFSDRGIPDGHRHMNGYGSHTFKLVNANGEAVYCKFHYKTDQGIKNLSVEDAARLSQEDPDYGIRDLFNAIATGKYPSWTFYIQVMTFNQAETFPFNPFDLTKVWPHKDYPLIPVGKLVLNRNPVNYFAEVEQIAFDPSNMPPGIEASPDKMLQGRLFAYPDTHRHRLGPNYLHIPVNCPYRARVANYQRDGPMCMQDNQGGAPNYYPNSFGAPEQQPSALEHSIQYSGEVRRFNTANDDNVTQVRAFYVNVLNEEQRKRLCENIAGHLKDAQIFIQKKAVKNFTEVHPDYGSHIQALLDKYNAEKPKNAIHTFVQSGSHLAAREKANL

SEQ ID NO: 84 - protein, 524 aa, Artificial Sequence
  Artificial mutant polypeptide
  MUTAGEN (69)..(69)
ADSRDPASDQMQHWKEQRAAQKADVLTTGAGNPVGDKLNVITVGPRGPLLVQDVVFTDEAHFDRERIPQRVVHAKGAGAFGYFEVTHDITKYSKAKVFEHIGKKTPIAVRFSTVAGESGSADTVRDPRGFAVKFYTEDGNWDLVGNNTPIFFIRDPILFPSFIHSQKRNPQTHLKDPDVWDFWSLRPESLHQVSFLFSDRGIPDGHRHMNGYGSHTFKLVNANGEAVYCKFHYKTDQGIKNLSVEDAARLSQEDPDYGIRDLFNAIATGKYPSWTFYIQVMTFNQAETFPFNPFDLTKVWPHKDYPLIPVGKLVLNRNPVNYFAEVEQIAFDPSNMPPGIEASPDKMLQGRLFAYPDTHRHRLGPNYLHIPVNCPYRARVANYQRDGPMCMQDNQGGAPNYYPNSFGAPEQQPSALEHSIQYSGEVRRFNTANDDNVTQVRAFYVNVLNEEQRKRLCENIAGHLKDAQIFIQKKAVKNFTEVHPDYGSHIQALLDKYNAEKPKNAIHTFVQSGSHLAAREKANL

SEQ ID NO: 85 - protein, 524 aa, Artificial Sequence
  Artificial mutant polypeptide
  MUTAGEN (84)..(84)
ADSRDPASDQMQHWKEQRAAQKADVLTTGAGNPVGDKLNVITVGPRGPLLVQDVVFTDEAHFDRERIPERVVHAKGAGAFGYFQVTHDITKYSKAKVFEHIGKKTPIAVRFSTVAGESGSADTVRDPRGFAVKFYTEDGNWDLVGNNTPIFFIRDPILFPSFIHSQKRNPQTHLKDPDVWDFWSLRPESLHQVSFLFSDRGIPDGHRHMNGYGSHTFKLVNANGEAVYCKFHYKTDQGIKNLSVEDAARLSQEDPDYGIRDLFNAIATGKYPSWTFYIQVMTFNQAETFPFNPFDLTKVWPHKDYPLIPVGKLVLNRNPVNYFAEVEQIAFDPSNMPPGIEASPDKMLQGRLFAYPDTHRHRLGPNYLHIPVNCPYRARVANYQRDGPMCMQDNQGGAPNYYPNSFGAPEQQPSALEHSIQYSGEVRRFNTANDDNVTQVRAFYVNVLNEEQRKRLCENIAGHLKDAQIFIQKKAVKNFTEVHPDYGSHIQALLDKYNAEKPKNAIHTFVQSGSHLAAREKANL

SEQ ID NO: 86 - protein, 524 aa, Artificial Sequence
  Artificial mutant polypeptide
  MUTAGEN (99)..(99)
ADSRDPASDQMQHWKEQRAAQKADVLTTGAGNPVGDKLNVITVGPRGPLLVQDVVFTDEAHFDRERIPERVVHAKGAGAFGYFEVTHDITKYSKAKVFQHIGKKTPIAVRFSTVAGESGSADTVRDPRGFAVKFYTEDGNWDLVGNNTPIFFIRDPILFPSFIHSQKRNPQTHLKDPDVWDFWSLRPESLHQVSFLFSDRGIPDGHRHMNGYGSHTFKLVNANGEAVYCKFHYKTDQGIKNLSVEDAARLSQEDPDYGIRDLFNAIATGKYPSWTFYIQVMTFNQAETFPFNPFDLTKVWPHKDYPLIPVGKLVLNRNPVNYFAEVEQIAFDPSNMPPGIEASPDKMLQGRLFAYPDTHRHRLGPNYLHIPVNCPYRARVANYQRDGPMCMQDNQGGAPNYYPNSFGAPEQQPSALEHSIQYSGEVRRFNTANDDNVTQVRAFYVNVLNEEQRKRLCENIAGHLKDAQIFIQKKAVKNFTEVHPDYGSHIQALLDKYNAEKPKNAIHTFVQSGSHLAAREKANL

SEQ ID NO: 87 - protein, 524 aa, Artificial Sequence
  Artificial mutant polypeptide
  MUTAGEN (117)..(117)
ADSRDPASDQMQHWKEQRAAQKADVLTTGAGNPVGDKLNVITVGPRGPLLVQDVVFTDEAHFDRERIPERVVHAKGAGAFGYFEVTHDITKYSKAKVFEHIGKKTPIAVRFSTVAGQSGSADTVRDPRGFAVKFYTEDGNWDLVGNNTPIFFIRDPILFPSFIHSQKRNPQTHLKDPDVWDFWSLRPESLHQVSFLFSDRGIPDGHRHMNGYGSHTFKLVNANGEAVYCKFHYKTDQGIKNLSVEDAARLSQEDPDYGIRDLFNAIATGKYPSWTFYIQVMTFNQAETFPFNPFDLTKVWPHKDYPLIPVGKLVLNRNPVNYFAEVEQIAFDPSNMPPGIEASPDKMLQGRLFAYPDTHRHRLGPNYLHIPVNCPYRARVANYQRDGPMCMQDNQGGAPNYYPNSFGAPEQQPSALEHSIQYSGEVRRFNTANDDNVTQVRAFYVNVLNEEQRKRLCENIAGHLKDAQIFIQKKAVKNFTEVHPDYGSHIQALLDKYNAEKPKNAIHTFVQSGSHLAAREKANL

SEQ ID NO: 88 - protein, 524 aa, Artificial Sequence
  Artificial mutant polypeptide
  MUTAGEN (137)..(137)
ADSRDPASDQMQHWKEQRAAQKADVLTTGAGNPVGDKLNVITVGPRGPLLVQDVVFTDEAHFDRERIPERVVHAKGAGAFGYFEVTHDITKYSKAKVFEHIGKKTPIAVRFSTVAGESGSADTVRDPRGFAVKFYTQDGNWDLVGNNTPIFFIRDPILFPSFIHSQKRNPQTHLKDPDVWDFWSLRPESLHQVSFLFSDRGIPDGHRHMNGYGSHTFKLVNANGEAVYCKFHYKTDQGIKNLSVEDAARLSQEDPDYGIRDLFNAIATGKYPSWTFYIQVMTFNQAETFPFNPFDLTKVWPHKDYPLIPVGKLVLNRNPVNYFAEVEQIAFDPSNMPPGIEASPDKMLQGRLFAYPDTHRHRLGPNYLHIPVNCPYRARVANYQRDGPMCMQDNQGGAPNYYPNSFGAPEQQPSALEHSIQYSGEVRRFNTANDDNVTQVRAFYVNVLNEEQRKRLCENIAGHLKDAQIFIQKKAVKNFTEVHPDYGSHIQALLDKYNAEKPKNAIHTFVQSGSHLAAREKANL

SEQ ID NO: 89 - protein, 524 aa, Artificial Sequence
  Artificial mutant polypeptide
  MUTAGEN (188)..(188)
ADSRDPASDQMQHWKEQRAAQKADVLTTGAGNPVGDKLNVITVGPRGPLLVQDVVFTDEAHFDRERIPERVVHAKGAGAFGYFEVTHDITKYSKAKVFEHIGKKTPIAVRFSTVAGESGSADTVRDPRGFAVKFYTEDGNWDLVGNNTPIFFIRDPILFPSFIHSQKRNPQTHLKDPDVWDFWSLRPQSLHQVSFLFSDRGIPDGHRHMNGYGSHTFKLVNANGEAVYCKFHYKTDQGIKNLSVEDAARLSQEDPDYGIRDLFNAIATGKYPSWTFYIQVMTFNQAETFPFNPFDLTKVWPHKDYPLIPVGKLVLNRNPVNYFAEVEQIAFDPSNMPPGIEASPDKMLQGRLFAYPDTHRHRLGPNYLHIPVNCPYRARVANYQRDGPMCMQDNQGGAPNYYPNSFGAPEQQPSALEHSIQYSGEVRRFNTANDDNVTQVRAFYVNVLNEEQRKRLCENIAGHLKDAQIFIQKKAVKNFTEVHPDYGSHIQALLDKYNAEKPKNAIHTFVQSGSHLAAREKANL

SEQ ID NO: 90 - protein, 524 aa, Artificial Sequence
  Artificial mutant polypeptide
  MUTAGEN (225)..(225)
ADSRDPASDQMQHWKEQRAAQKADVLTTGAGNPVGDKLNVITVGPRGPLLVQDVVFTDEAHFDRERIPERVVHAKGAGAFGYFEVTHDITKYSKAKVFEHIGKKTPIAVRFSTVAGESGSADTVRDPRGFAVKFYTEDGNWDLVGNNTPIFFIRDPILFPSFIHSQKRNPQTHLKDPDVWDFWSLRPESLHQVSFLFSDRGIPDGHRHMNGYGSHTFKLVNANGQAVYCKFHYKTDQGIKNLSVEDAARLSQEDPDYGIRDLFNAIATGKYPSWTFYIQVMTFNQAETFPFNPFDLTKVWPHKDYPLIPVGKLVLNRNPVNYFAEVEQIAFDPSNMPPGIEASPDKMLQGRLFAYPDTHRHRLGPNYLHIPVNCPYRARVANYQRDGPMCMQDNQGGAPNYYPNSFGAPEQQPSALEHSIQYSGEVRRFNTANDDNVTQVRAFYVNVLNEEQRKRLCENIAGHLKDAQIFIQKKAVKNFTEVHPDYGSHIQALLDKYNAEKPKNAIHTFVQSGSHLAAREKANL

SEQ ID NO: 91 - protein, 524 aa, Artificial Sequence
  Artificial mutant polypeptide
  MUTAGEN (245)..(245)
ADSRDPASDQMQHWKEQRAAQKADVLTTGAGNPVGDKLNVITVGPRGPLLVQDVVFTDEAHFDRERIPERVVHAKGAGAFGYFEVTHDITKYSKAKVFEHIGKKTPIAVRFSTVAGESGSADTVRDPRGFAVKFYTEDGNWDLVGNNTPIFFIRDPILFPSFIHSQKRNPQTHLKDPDVWDFWSLRPESLHQVSFLFSDRGIPDGHRHMNGYGSHTFKLVNANGEAVYCKFHYKTDQGIKNLSVQDAARLSQEDPDYGIRDLFNAIATGKYPSWTFYIQVMTFNQAETFPFNPFDLTKVWPHKDYPLIPVGKLVLNRNPVNYFAEVEQIAFDPSNMPPGIEASPDKMLQGRLFAYPDTHRHRLGPNYLHIPVNCPYRARVANYQRDGPMCMQDNQGGAPNYYPNSFGAPEQQPSALEHSIQYSGEVRRFNTANDDNVTQVRAFYVNVLNEEQRKRLCENIAGHLKDAQIFIQKKAVKNFTEVHPDYGSHIQALLDKYNAEKPKNAIHTFVQSGSHLAAREKANL

SEQ ID NO: 92 - protein, 524 aa, Artificial Sequence
  Artificial mutant polypeptide
  MUTAGEN (253)..(253)
ADSRDPASDQMQHWKEQRAAQKADVLTTGAGNPVGDKLNVITVGPRGPLLVQDVVFTDEAHFDRERIPERVVHAKGAGAFGYFEVTHDITKYSKAKVFEHIGKKTPIAVRFSTVAGESGSADTVRDPRGFAVKFYTEDGNWDLVGNNTPIFFIRDPILFPSFIHSQKRNPQTHLKDPDVWDFWSLRPESLHQVSFLFSDRGIPDGHRHMNGYGSHTFKLVNANGEAVYCKFHYKTDQGIKNLSVEDAARLSQQDPDYGIRDLFNAIATGKYPSWTFYIQVMTFNQAETFPFNPFDLTKVWPHKDYPLIPVGKLVLNRNPVNYFAEVEQIAFDPSNMPPGIEASPDKMLQGRLFAYPDTHRHRLGPNYLHIPVNCPYRARVANYQRDGPMCMQDNQGGAPNYYPNSFGAPEQQPSALEHSIQYSGEVRRFNTANDDNVTQVRAFYVNVLNEEQRKRLCENIAGHLKDAQIFIQKKAVKNFTEVHPDYGSHIQALLDKYNAEKPKNAIHTFVQSGSHLAAREKANL

SEQ ID NO: 93 - protein, 524 aa, Artificial Sequence
  Artificial mutant polypeptide
  MUTAGEN (287)..(287)
ADSRDPASDQMQHWKEQRAAQKADVLTTGAGNPVGDKLNVITVGPRGPLLVQDVVFTDEAHFDRERIPERVVHAKGAGAFGYFEVTHDITKYSKAKVFEHIGKKTPIAVRFSTVAGESGSADTVRDPRGFAVKFYTEDGNWDLVGNNTPIFFIRDPILFPSFIHSQKRNPQTHLKDPDVWDFWSLRPESLHQVSFLFSDRGIPDGHRHMNGYGSHTFKLVNANGEAVYCKFHYKTDQGIKNLSVEDAARLSQEDPDYGIRDLFNAIATGKYPSWTFYIQVMTFNQAQTFPFNPFDLTKVWPHKDYPLIPVGKLVLNRNPVNYFAEVEQIAFDPSNMPPGIEASPDKMLQGRLFAYPDTHRHRLGPNYLHIPVNCPYRARVANYQRDGPMCMQDNQGGAPNYYPNSFGAPEQQPSALEHSIQYSGEVRRFNTANDDNVTQVRAFYVNVLNEEQRKRLCENIAGHLKDAQIFIQKKAVKNFTEVHPDYGSHIQALLDKYNAEKPKNAIHTFVQSGSHLAAREKANL

SEQ ID NO: 94 - protein, 524 aa, Artificial Sequence
  Artificial mutant polypeptide
  MUTAGEN (325)..(325)
ADSRDPASDQMQHWKEQRAAQKADVLTTGAGNPVGDKLNVITVGPRGPLLVQDVVFTDEAHFDRERIPERVVHAKGAGAFGYFEVTHDITKYSKAKVFEHIGKKTPIAVRFSTVAGESGSADTVRDPRGFAVKFYTEDGNWDLVGNNTPIFFIRDPILFPSFIHSQKRNPQTHLKDPDVWDFWSLRPESLHQVSFLFSDRGIPDGHRHMNGYGSHTFKLVNANGEAVYCKFHYKTDQGIKNLSVEDAARLSQEDPDYGIRDLFNAIATGKYPSWTFYIQVMTFNQAETFPFNPFDLTKVWPHKDYPLIPVGKLVLNRNPVNYFAQVEQIAFDPSNMPPGIEASPDKMLQGRLFAYPDTHRHRLGPNYLHIPVNCPYRARVANYQRDGPMCMQDNQGGAPNYYPNSFGAPEQQPSALEHSIQYSGEVRRFNTANDDNVTQVRAFYVNVLNEEQRKRLCENIAGHLKDAQIFIQKKAVKNFTEVHPDYGSHIQALLDKYNAEKPKNAIHTFVQSGSHLAAREKANL

SEQ ID NO: 95 - protein, 524 aa, Artificial Sequence
  Artificial mutant polypeptide
  MUTAGEN (327)..(327)
ADSRDPASDQMQHWKEQRAAQKADVLTTGAGNPVGDKLNVITVGPRGPLLVQDVVFTDEAHFDRERIPERVVHAKGAGAFGYFEVTHDITKYSKAKVFEHIGKKTPIAVRFSTVAGESGSADTVRDPRGFAVKFYTEDGNWDLVGNNTPIFFIRDPILFPSFIHSQKRNPQTHLKDPDVWDFWSLRPESLHQVSFLFSDRGIPDGHRHMNGYGSHTFKLVNANGEAVYCKFHYKTDQGIKNLSVEDAARLSQEDPDYGIRDLFNAIATGKYPSWTFYIQVMTFNQAETFPFNPFDLTKVWPHKDYPLIPVGKLVLNRNPVNYFAEVQQIAFDPSNMPPGIEASPDKMLQGRLFAYPDTHRHRLGPNYLHIPVNCPYRARVANYQRDGPMCMQDNQGGAPNYYPNSFGAPEQQPSALEHSIQYSGEVRRFNTANDDNVTQVRAFYVNVLNEEQRKRLCENIAGHLKDAQIFIQKKAVKNFTEVHPDYGSHIQALLDKYNAEKPKNAIHTFVQSGSHLAAREKANL

SEQ ID NO: 96 - protein, 524 aa, Artificial Sequence
  Artificial mutant polypeptide
  MUTAGEN (341)..(341)
ADSRDPASDQMQHWKEQRAAQKADVLTTGAGNPVGDKLNVITVGPRGPLLVQDVVFTDEAHFDRERIPERVVHAKGAGAFGYFEVTHDITKYSKAKVFEHIGKKTPIAVRFSTVAGESGSADTVRDPRGFAVKFYTEDGNWDLVGNNTPIFFIRDPILFPSFIHSQKRNPQTHLKDPDVWDFWSLRPESLHQVSFLFSDRGIPDGHRHMNGYGSHTFKLVNANGEAVYCKFHYKTDQGIKNLSVEDAARLSQEDPDYGIRDLFNAIATGKYPSWTFYIQVMTFNQAETFPFNPFDLTKVWPHKDYPLIPVGKLVLNRNPVNYFAEVEQIAFDPSNMPPGIQASPDKMLQGRLFAYPDTHRHRLGPNYLHIPVNCPYRARVANYQRDGPMCMQDNQGGAPNYYPNSFGAPEQQPSALEHSIQYSGEVRRFNTANDDNVTQVRAFYVNVLNEEQRKRLCENIAGHLKDAQIFIQKKAVKNFTEVHPDYGSHIQALLDKYNAEKPKNAIHTFVQSGSHLAAREKANL

SEQ ID NO: 97 - protein, 524 aa, Artificial Sequence
  Artificial mutant polypeptide
  MUTAGEN (410)..(410)
ADSRDPASDQMQHWKEQRAAQKADVLTTGAGNPVGDKLNVITVGPRGPLLVQDVVFTDEAHFDRERIPERVVHAKGAGAFGYFEVTHDITKYSKAKVFEHIGKKTPIAVRFSTVAGESGSADTVRDPRGFAVKFYTEDGNWDLVGNNTPIFFIRDPILFPSFIHSQKRNPQTHLKDPDVWDFWSLRPESLHQVSFLFSDRGIPDGHRHMNGYGSHTFKLVNANGEAVYCKFHYKTDQGIKNLSVEDAARLSQEDPDYGIRDLFNAIATGKYPSWTFYIQVMTFNQAETFPFNPFDLTKVWPHKDYPLIPVGKLVLNRNPVNYFAEVEQIAFDPSNMPPGIEASPDKMLQGRLFAYPDTHRHRLGPNYLHIPVNCPYRARVANYQRDGPMCMQDNQGGAPNYYPNSFGAPQQQPSALEHSIQYSGEVRRFNTANDDNVTQVRAFYVNVLNEEQRKRLCENIAGHLKDAQIFIQKKAVKNFTEVHPDYGSHIQALLDKYNAEKPKNAIHTFVQSGSHLAAREKANL

SEQ ID NO: 98 - protein, 524 aa, Artificial Sequence
  Artificial mutant polypeptide
  MUTAGEN (417)..(417)
ADSRDPASDQMQHWKEQRAAQKADVLTTGAGNPVGDKLNVITVGPRGPLLVQDVVFTDEAHFDRERIPERVVHAKGAGAFGYFEVTHDITKYSKAKVFEHIGKKTPIAVRFSTVAGESGSADTVRDPRGFAVKFYTEDGNWDLVGNNTPIFFIRDPILFPSFIHSQKRNPQTHLKDPDVWDFWSLRPESLHQVSFLFSDRGIPDGHRHMNGYGSHTFKLVNANGEAVYCKFHYKTDQGIKNLSVEDAARLSQEDPDYGIRDLFNAIATGKYPSWTFYIQVMTFNQAETFPFNPFDLTKVWPHKDYPLIPVGKLVLNRNPVNYFAEVEQIAFDPSNMPPGIEASPDKMLQGRLFAYPDTHRHRLGPNYLHIPVNCPYRARVANYQRDGPMCMQDNQGGAPNYYPNSFGAPEQQPSALQHSIQYSGEVRRFNTANDDNVTQVRAFYVNVLNEEQRKRLCENIAGHLKDAQIFIQKKAVKNFTEVHPDYGSHIQALLDKYNAEKPKNAIHTFVQSGSHLAAREKANL

SEQ ID NO: 99 - protein, 524 aa, Artificial Sequence
  Artificial mutant polypeptide
  MUTAGEN (425)..(425)
ADSRDPASDQMQHWKEQRAAQKADVLTTGAGNPVGDKLNVITVGPRGPLLVQDVVFTDEAHFDRERIPERVVHAKGAGAFGYFEVTHDITKYSKAKVFEHIGKKTPIAVRFSTVAGESGSADTVRDPRGFAVKFYTEDGNWDLVGNNTPIFFIRDPILFPSFIHSQKRNPQTHLKDPDVWDFWSLRPESLHQVSFLFSDRGIPDGHRHMNGYGSHTFKLVNANGEAVYCKFHYKTDQGIKNLSVEDAARLSQEDPDYGIRDLFNAIATGKYPSWTFYIQVMTFNQAETFPFNPFDLTKVWPHKDYPLIPVGKLVLNRNPVNYFAEVEQIAFDPSNMPPGIEASPDKMLQGRLFAYPDTHRHRLGPNYLHIPVNCPYRARVANYQRDGPMCMQDNQGGAPNYYPNSFGAPEQQPSALEHSIQYSGQVRRFNTANDDNVTQVRAFYVNVLNEEQRKRLCENIAGHLKDAQIFIQKKAVKNFTEVHPDYGSHIQALLDKYNAEKPKNAIHTFVQSGSHLAAREKANL

SEQ ID NO: 100 - protein, 524 aa, Artificial Sequence
  Artificial mutant polypeptide
  MUTAGEN (450)..(450)
ADSRDPASDQMQHWKEQRAAQKADVLTTGAGNPVGDKLNVITVGPRGPLLVQDVVFTDEAHFDRERIPERVVHAKGAGAFGYFEVTHDITKYSKAKVFEHIGKKTPIAVRFSTVAGESGSADTVRDPRGFAVKFYTEDGNWDLVGNNTPIFFIRDPILFPSFIHSQKRNPQTHLKDPDVWDFWSLRPESLHQVSFLFSDRGIPDGHRHMNGYGSHTFKLVNANGEAVYCKFHYKTDQGIKNLSVEDAARLSQEDPDYGIRDLFNAIATGKYPSWTFYIQVMTFNQAETFPFNPFDLTKVWPHKDYPLIPVGKLVLNRNPVNYFAEVEQIAFDPSNMPPGIEASPDKMLQGRLFAYPDTHRHRLGPNYLHIPVNCPYRARVANYQRDGPMCMQDNQGGAPNYYPNSFGAPEQQPSALEHSIQYSGEVRRFNTANDDNVTQVRAFYVNVLNQEQRKRLCENIAGHLKDAQIFIQKKAVKNFTEVHPDYGSHIQALLDKYNAEKPKNAIHTFVQSGSHLAAREKANL

SEQ ID NO: 101 - protein, 524 aa, Artificial Sequence
  Artificial mutant polypeptide
  MUTAGEN (451)..(451)
ADSRDPASDQMQHWKEQRAAQKADVLTTGAGNPVGDKLNVITVGPRGPLLVQDVVFTDEAHFDRERIPERVVHAKGAGAFGYFEVTHDITKYSKAKVFEHIGKKTPIAVRFSTVAGESGSADTVRDPRGFAVKFYTEDGNWDLVGNNTPIFFIRDPILFPSFIHSQKRNPQTHLKDPDVWDFWSLRPESLHQVSFLFSDRGIPDGHRHMNGYGSHTFKLVNANGEAVYCKFHYKTDQGIKNLSVEDAARLSQEDPDYGIRDLFNAIATGKYPSWTFYIQVMTFNQAETFPFNPFDLTKVWPHKDYPLIPVGKLVLNRNPVNYFAEVEQIAFDPSNMPPGIEASPDKMLQGRLFAYPDTHRHRLGPNYLHIPVNCPYRARVANYQRDGPMCMQDNQGGAPNYYPNSFGAPEQQPSALEHSIQYSGEVRRFNTANDDNVTQVRAFYVNVLNEQQRKRLCENIAGHLKDAQIFIQKKAVKNFTEVHPDYGSHIQALLDKYNAEKPKNAIHTFVQSGSHLAAREKANL

SEQ ID NO: 102 - protein, 524 aa, Artificial Sequence
  Artificial mutant polypeptide
  MUTAGEN (458)..(458)
ADSRDPASDQMQHWKEQRAAQKADVLTTGAGNPVGDKLNVITVGPRGPLLVQDVVFTDEAHFDRERIPERVVHAKGAGAFGYFEVTHDITKYSKAKVFEHIGKKTPIAVRFSTVAGESGSADTVRDPRGFAVKFYTEDGNWDLVGNNTPIFFIRDPILFPSFIHSQKRNPQTHLKDPDVWDFWSLRPESLHQVSFLFSDRGIPDGHRHMNGYGSHTFKLVNANGEAVYCKFHYKTDQGIKNLSVEDAARLSQEDPDYGIRDLFNAIATGKYPSWTFYIQVMTFNQAETFPFNPFDLTKVWPHKDYPLIPVGKLVLNRNPVNYFAEVEQIAFDPSNMPPGIEASPDKMLQGRLFAYPDTHRHRLGPNYLHIPVNCPYRARVANYQRDGPMCMQDNQGGAPNYYPNSFGAPEQQPSALEHSIQYSGEVRRFNTANDDNVTQVRAFYVNVLNEEQRKRLCQNIAGHLKDAQIFIQKKAVKNFTEVHPDYGSHIQALLDKYNAEKPKNAIHTFVQSGSHLAAREKANL

SEQ ID NO: 103 - protein, 524 aa, Artificial Sequence
  Artificial mutant polypeptide
  MUTAGEN (481)..(481)
ADSRDPASDQMQHWKEQRAAQKADVLTTGAGNPVGDKLNVITVGPRGPLLVQDVVFTDEAHFDRERIPERVVHAKGAGAFGYFEVTHDITKYSKAKVFEHIGKKTPIAVRFSTVAGESGSADTVRDPRGFAVKFYTEDGNWDLVGNNTPIFFIRDPILFPSFIHSQKRNPQTHLKDPDVWDFWSLRPESLHQVSFLFSDRGIPDGHRHMNGYGSHTFKLVNANGEAVYCKFHYKTDQGIKNLSVEDAARLSQEDPDYGIRDLFNAIATGKYPSWTFYIQVMTFNQAETFPFNPFDLTKVWPHKDYPLIPVGKLVLNRNPVNYFAEVEQIAFDPSNMPPGIEASPDKMLQGRLFAYPDTHRHRLGPNYLHIPVNCPYRARVANYQRDGPMCMQDNQGGAPNYYPNSFGAPEQQPSALEHSIQYSGEVRRFNTANDDNVTQVRAFYVNVLNEEQRKRLCENIAGHLKDAQIFIQKKAVKNFTQVHPDYGSHIQALLDKYNAEKPKNAIHTFVQSGSHLAAREKANL

SEQ ID NO: 104 - protein, 524 aa, Artificial Sequence
  Artificial mutant polypeptide
  MUTAGEN (500)..(500)
ADSRDPASDQMQHWKEQRAAQKADVLTTGAGNPVGDKLNVITVGPRGPLLVQDVVFTDEAHFDRERIPERVVHAKGAGAFGYFEVTHDITKYSKAKVFEHIGKKTPIAVRFSTVAGESGSADTVRDPRGFAVKFYTEDGNWDLVGNNTPIFFIRDPILFPSFIHSQKRNPQTHLKDPDVWDFWSLRPESLHQVSFLFSDRGIPDGHRHMNGYGSHTFKLVNANGEAVYCKFHYKTDQGIKNLSVEDAARLSQEDPDYGIRDLFNAIATGKYPSWTFYIQVMTFNQAETFPFNPFDLTKVWPHKDYPLIPVGKLVLNRNPVNYFAEVEQIAFDPSNMPPGIEASPDKMLQGRLFAYPDTHRHRLGPNYLHIPVNCPYRARVANYQRDGPMCMQDNQGGAPNYYPNSFGAPEQQPSALEHSIQYSGEVRRFNTANDDNVTQVRAFYVNVLNEEQRKRLCENIAGHLKDAQIFIQKKAVKNFTEVHPDYGSHIQALLDKYNAQKPKNAIHTFVQSGSHLAAREKANL

SEQ ID NO: 105 - protein, 524 aa, Artificial Sequence
  Artificial mutant polypeptide
  MUTAGEN (520)..(520)
ADSRDPASDQMQHWKEQRAAQKADVLTTGAGNPVGDKLNVITVGPRGPLLVQDVVFTDEAHFDRERIPERVVHAKGAGAFGYFEVTHDITKYSKAKVFEHIGKKTPIAVRFSTVAGESGSADTVRDPRGFAVKFYTEDGNWDLVGNNTPIFFIRDPILFPSFIHSQKRNPQTHLKDPDVWDFWSLRPESLHQVSFLFSDRGIPDGHRHMNGYGSHTFKLVNANGEAVYCKFHYKTDQGIKNLSVEDAARLSQEDPDYGIRDLFNAIATGKYPSWTFYIQVMTFNQAETFPFNPFDLTKVWPHKDYPLIPVGKLVLNRNPVNYFAEVEQIAFDPSNMPPGIEASPDKMLQGRLFAYPDTHRHRLGPNYLHIPVNCPYRARVANYQRDGPMCMQDNQGGAPNYYPNSFGAPEQQPSALEHSIQYSGEVRRFNTANDDNVTQVRAFYVNVLNEEQRKRLCENIAGHLKDAQIFIQKKAVKNFTEVHPDYGSHIQALLDKYNAEKPKNAIHTFVQSGSHLAARQKANL

SEQ ID NO: 106 - protein, 524 aa, Artificial Sequence
  Artificial mutant polypeptide
  MUTAGEN (10)..(10)
ADSRDPASDEMQHWKEQRAAQKADVLTTGAGNPVGDKLNVITVGPRGPLLVQDVVFTDEAHFDRERIPERVVHAKGAGAFGYFEVTHDITKYSKAKVFEHIGKKTPIAVRFSTVAGESGSADTVRDPRGFAVKFYTEDGNWDLVGNNTPIFFIRDPILFPSFIHSQKRNPQTHLKDPDVWDFWSLRPESLHQVSFLFSDRGIPDGHRHMNGYGSHTFKLVNANGEAVYCKFHYKTDQGIKNLSVEDAARLSQEDPDYGIRDLFNAIATGKYPSWTFYIQVMTFNQAETFPFNPFDLTKVWPHKDYPLIPVGKLVLNRNPVNYFAEVEQIAFDPSNMPPGIEASPDKMLQGRLFAYPDTHRHRLGPNYLHIPVNCPYRARVANYQRDGPMCMQDNQGGAPNYYPNSFGAPEQQPSALEHSIQYSGEVRRFNTANDDNVTQVRAFYVNVLNEEQRKRLCENIAGHLKDAQIFIQKKAVKNFTEVHPDYGSHIQALLDKYNAEKPKNAIHTFVQSGSHLAAREKANL

SEQ ID NO: 107 - protein, 524 aa, Artificial Sequence
  Artificial mutant polypeptide
  MUTAGEN (12)..(12)
ADSRDPASDQMEHWKEQRAAQKADVLTTGAGNPVGDKLNVITVGPRGPLLVQDVVFTDEAHFDRERIPERVVHAKGAGAFGYFEVTHDITKYSKAKVFEHIGKKTPIAVRFSTVAGESGSADTVRDPRGFAVKFYTEDGNWDLVGNNTPIFFIRDPILFPSFIHSQKRNPQTHLKDPDVWDFWSLRPESLHQVSFLFSDRGIPDGHRHMNGYGSHTFKLVNANGEAVYCKFHYKTDQGIKNLSVEDAARLSQEDPDYGIRDLFNAIATGKYPSWTFYIQVMTFNQAETFPFNPFDLTKVWPHKDYPLIPVGKLVLNRNPVNYFAEVEQIAFDPSNMPPGIEASPDKMLQGRLFAYPDTHRHRLGPNYLHIPVNCPYRARVANYQRDGPMCMQDNQGGAPNYYPNSFGAPEQQPSALEHSIQYSGEVRRFNTANDDNVTQVRAFYVNVLNEEQRKRLCENIAGHLKDAQIFIQKKAVKNFTEVHPDYGSHIQALLDKYNAEKPKNAIHTFVQSGSHLAAREKANL

SEQ ID NO: 108 - protein, 524 aa, Artificial Sequence
  Artificial mutant polypeptide
  MUTAGEN (17)..(17)
ADSRDPASDQMQHWKEERAAQKADVLTTGAGNPVGDKLNVITVGPRGPLLVQDVVFTDEAHFDRERIPERVVHAKGAGAFGYFEVTHDITKYSKAKVFEHIGKKTPIAVRFSTVAGESGSADTVRDPRGFAVKFYTEDGNWDLVGNNTPIFFIRDPILFPSFIHSQKRNPQTHLKDPDVWDFWSLRPESLHQVSFLFSDRGIPDGHRHMNGYGSHTFKLVNANGEAVYCKFHYKTDQGIKNLSVEDAARLSQEDPDYGIRDLFNAIATGKYPSWTFYIQVMTFNQAETFPFNPFDLTKVWPHKDYPLIPVGKLVLNRNPVNYFAEVEQIAFDPSNMPPGIEASPDKMLQGRLFAYPDTHRHRLGPNYLHIPVNCPYRARVANYQRDGPMCMQDNQGGAPNYYPNSFGAPEQQPSALEHSIQYSGEVRRFNTANDDNVTQVRAFYVNVLNEEQRKRLCENIAGHLKDAQIFIQKKAVKNFTEVHPDYGSHIQALLDKYNAEKPKNAIHTFVQSGSHLAAREKANL

SEQ ID NO: 109 - protein, 524 aa, Artificial Sequence
  Artificial mutant polypeptide
  MUTAGEN (21)..(21)
ADSRDPASDQMQHWKEQRAAEKADVLTTGAGNPVGDKLNVITVGPRGPLLVQDVVFTDEAHFDRERIPERVVHAKGAGAFGYFEVTHDITKYSKAKVFEHIGKKTPIAVRFSTVAGESGSADTVRDPRGFAVKFYTEDGNWDLVGNNTPIFFIRDPILFPSFIHSQKRNPQTHLKDPDVWDFWSLRPESLHQVSFLFSDRGIPDGHRHMNGYGSHTFKLVNANGEAVYCKFHYKTDQGIKNLSVEDAARLSQEDPDYGIRDLFNAIATGKYPSWTFYIQVMTFNQAETFPFNPFDLTKVWPHKDYPLIPVGKLVLNRNPVNYFAEVEQIAFDPSNMPPGIEASPDKMLQGRLFAYPDTHRHRLGPNYLHIPVNCPYRARVANYQRDGPMCMQDNQGGAPNYYPNSFGAPEQQPSALEHSIQYSGEVRRFNTANDDNVTQVRAFYVNVLNEEQRKRLCENIAGHLKDAQIFIQKKAVKNFTEVHPDYGSHIQALLDKYNAEKPKNAIHTFVQSGSHLAAREKANL

SEQ ID NO: 110 - protein, 524 aa, Artificial Sequence
  Artificial mutant polypeptide
  MUTAGEN (52)..(52)
ADSRDPASDQMQHWKEQRAAQKADVLTTGAGNPVGDKLNVITVGPRGPLLVEDVVFTDEAHFDRERIPERVVHAKGAGAFGYFEVTHDITKYSKAKVFEHIGKKTPIAVRFSTVAGESGSADTVRDPRGFAVKFYTEDGNWDLVGNNTPIFFIRDPILFPSFIHSQKRNPQTHLKDPDVWDFWSLRPESLHQVSFLFSDRGIPDGHRHMNGYGSHTFKLVNANGEAVYCKFHYKTDQGIKNLSVEDAARLSQEDPDYGIRDLFNAIATGKYPSWTFYIQVMTFNQAETFPFNPFDLTKVWPHKDYPLIPVGKLVLNRNPVNYFAEVEQIAFDPSNMPPGIEASPDKMLQGRLFAYPDTHRHRLGPNYLHIPVNCPYRARVANYQRDGPMCMQDNQGGAPNYYPNSFGAPEQQPSALEHSIQYSGEVRRFNTANDDNVTQVRAFYVNVLNEEQRKRLCENIAGHLKDAQIFIQKKAVKNFTEVHPDYGSHIQALLDKYNAEKPKNAIHTFVQSGSHLAAREKANL

SEQ ID NO: 111 - protein, 524 aa, Artificial Sequence
  Artificial mutant polypeptide
  MUTAGEN (166)..(166)
ADSRDPASDQMQHWKEQRAAQKADVLTTGAGNPVGDKLNVITVGPRGPLLVQDVVFTDEAHFDRERIPERVVHAKGAGAFGYFEVTHDITKYSKAKVFEHIGKKTPIAVRFSTVAGESGSADTVRDPRGFAVKFYTEDGNWDLVGNNTPIFFIRDPILFPSFIHSEKRNPQTHLKDPDVWDFWSLRPESLHQVSFLFSDRGIPDGHRHMNGYGSHTFKLVNANGEAVYCKFHYKTDQGIKNLSVEDAARLSQEDPDYGIRDLFNAIATGKYPSWTFYIQVMTFNQAETFPFNPFDLTKVWPHKDYPLIPVGKLVLNRNPVNYFAEVEQIAFDPSNMPPGIEASPDKMLQGRLFAYPDTHRHRLGPNYLHIPVNCPYRARVANYQRDGPMCMQDNQGGAPNYYPNSFGAPEQQPSALEHSIQYSGEVRRFNTANDDNVTQVRAFYVNVLNEEQRKRLCENIAGHLKDAQIFIQKKAVKNFTEVHPDYGSHIQALLDKYNAEKPKNAIHTFVQSGSHLAAREKANL

SEQ ID NO: 112 - protein, 524 aa, Artificial Sequence
  Artificial mutant polypeptide
  MUTAGEN (171)..(171)
ADSRDPASDQMQHWKEQRAAQKADVLTTGAGNPVGDKLNVITVGPRGPLLVQDVVFTDEAHFDRERIPERVVHAKGAGAFGYFEVTHDITKYSKAKVFEHIGKKTPIAVRFSTVAGESGSADTVRDPRGFAVKFYTEDGNWDLVGNNTPIFFIRDPILFPSFIHSQKRNPETHLKDPDVWDFWSLRPESLHQVSFLFSDRGIPDGHRHMNGYGSHTFKLVNANGEAVYCKFHYKTDQGIKNLSVEDAARLSQEDPDYGIRDLFNAIATGKYPSWTFYIQVMTFNQAETFPFNPFDLTKVWPHKDYPLIPVGKLVLNRNPVNYFAEVEQIAFDPSNMPPGIEASPDKMLQGRLFAYPDTHRHRLGPNYLHIPVNCPYRARVANYQRDGPMCMQDNQGGAPNYYPNSFGAPEQQPSALEHSIQYSGEVRRFNTANDDNVTQVRAFYVNVLNEEQRKRLCENIAGHLKDAQIFIQKKAVKNFTEVHPDYGSHIQALLDKYNAEKPKNAIHTFVQSGSHLAAREKANL

SEQ ID NO: 113 - protein, 524 aa, Artificial Sequence
  Artificial mutant polypeptide
  MUTAGEN (192)..(192)
ADSRDPASDQMQHWKEQRAAQKADVLTTGAGNPVGDKLNVITVGPRGPLLVQDVVFTDEAHFDRERIPERVVHAKGAGAFGYFEVTHDITKYSKAKVFEHIGKKTPIAVRFSTVAGESGSADTVRDPRGFAVKFYTEDGNWDLVGNNTPIFFIRDPILFPSFIHSQKRNPQTHLKDPDVWDFWSLRPESLHEVSFLFSDRGIPDGHRHMNGYGSHTFKLVNANGEAVYCKFHYKTDQGIKNLSVEDAARLSQEDPDYGIRDLFNAIATGKYPSWTFYIQVMTFNQAETFPFNPFDLTKVWPHKDYPLIPVGKLVLNRNPVNYFAEVEQIAFDPSNMPPGIEASPDKMLQGRLFAYPDTHRHRLGPNYLHIPVNCPYRARVANYQRDGPMCMQDNQGGAPNYYPNSFGAPEQQPSALEHSIQYSGEVRRFNTANDDNVTQVRAFYVNVLNEEQRKRLCENIAGHLKDAQIFIQKKAVKNFTEVHPDYGSHIQALLDKYNAEKPKNAIHTFVQSGSHLAAREKANL

SEQ ID NO: 114 - protein, 524 aa, Artificial Sequence
  Artificial mutant polypeptide
  MUTAGEN (237)..(237)
ADSRDPASDQMQHWKEQRAAQKADVLTTGAGNPVGDKLNVITVGPRGPLLVQDVVFTDEAHFDRERIPERVVHAKGAGAFGYFEVTHDITKYSKAKVFEHIGKKTPIAVRFSTVAGESGSADTVRDPRGFAVKFYTEDGNWDLVGNNTPIFFIRDPILFPSFIHSQKRNPQTHLKDPDVWDFWSLRPESLHQVSFLFSDRGIPDGHRHMNGYGSHTFKLVNANGEAVYCKFHYKTDEGIKNLSVEDAARLSQEDPDYGIRDLFNAIATGKYPSWTFYIQVMTFNQAETFPFNPFDLTKVWPHKDYPLIPVGKLVLNRNPVNYFAEVEQIAFDPSNMPPGIEASPDKMLQGRLFAYPDTHRHRLGPNYLHIPVNCPYRARVANYQRDGPMCMQDNQGGAPNYYPNSFGAPEQQPSALEHSIQYSGEVRRFNTANDDNVTQVRAFYVNVLNEEQRKRLCENIAGHLKDAQIFIQKKAVKNFTEVHPDYGSHIQALLDKYNAEKPKNAIHTFVQSGSHLAAREKANL

SEQ ID NO: 115 - protein, 524 aa, Artificial Sequence
  Artificial mutant polypeptide
  MUTAGEN (252)..(252)
ADSRDPASDQMQHWKEQRAAQKADVLTTGAGNPVGDKLNVITVGPRGPLLVQDVVFTDEAHFDRERIPERVVHAKGAGAFGYFEVTHDITKYSKAKVFEHIGKKTPIAVRFSTVAGESGSADTVRDPRGFAVKFYTEDGNWDLVGNNTPIFFIRDPILFPSFIHSQKRNPQTHLKDPDVWDFWSLRPESLHQVSFLFSDRGIPDGHRHMNGYGSHTFKLVNANGEAVYCKFHYKTDQGIKNLSVEDAARLSEEDPDYGIRDLFNAIATGKYPSWTFYIQVMTFNQAETFPFNPFDLTKVWPHKDYPLIPVGKLVLNRNPVNYFAEVEQIAFDPSNMPPGIEASPDKMLQGRLFAYPDTHRHRLGPNYLHIPVNCPYRARVANYQRDGPMCMQDNQGGAPNYYPNSFGAPEQQPSALEHSIQYSGEVRRFNTANDDNVTQVRAFYVNVLNEEQRKRLCENIAGHLKDAQIFIQKKAVKNFTEVHPDYGSHIQALLDKYNAEKPKNAIHTFVQSGSHLAAREKANL

SEQ ID NO: 116 - protein, 524 aa, Artificial Sequence
  Artificial mutant polypeptide
  MUTAGEN (279)..(279)
ADSRDPASDQMQHWKEQRAAQKADVLTTGAGNPVGDKLNVITVGPRGPLLVQDVVFTDEAHFDRERIPERVVHAKGAGAFGYFEVTHDITKYSKAKVFEHIGKKTPIAVRFSTVAGESGSADTVRDPRGFAVKFYTEDGNWDLVGNNTPIFFIRDPILFPSFIHSQKRNPQTHLKDPDVWDFWSLRPESLHQVSFLFSDRGIPDGHRHMNGYGSHTFKLVNANGEAVYCKFHYKTDQGIKNLSVEDAARLSQEDPDYGIRDLFNAIATGKYPSWTFYIEVMTFNQAETFPFNPFDLTKVWPHKDYPLIPVGKLVLNRNPVNYFAEVEQIAFDPSNMPPGIEASPDKMLQGRLFAYPDTHRHRLGPNYLHIPVNCPYRARVANYQRDGPMCMQDNQGGAPNYYPNSFGAPEQQPSALEHSIQYSGEVRRFNTANDDNVTQVRAFYVNVLNEEQRKRLCENIAGHLKDAQIFIQKKAVKNFTEVHPDYGSHIQALLDKYNAEKPKNAIHTFVQSGSHLAAREKANL

SEQ ID NO: 117 - protein, 524 aa, Artificial Sequence
  Artificial mutant polypeptide
  MUTAGEN (285)..(285)
ADSRDPASDQMQHWKEQRAAQKADVLTTGAGNPVGDKLNVITVGPRGPLLVQDVVFTDEAHFDRERIPERVVHAKGAGAFGYFEVTHDITKYSKAKVFEHIGKKTPIAVRFSTVAGESGSADTVRDPRGFAVKFYTEDGNWDLVGNNTPIFFIRDPILFPSFIHSQKRNPQTHLKDPDVWDFWSLRPESLHQVSFLFSDRGIPDGHRHMNGYGSHTFKLVNANGEAVYCKFHYKTDQGIKNLSVEDAARLSQEDPDYGIRDLFNAIATGKYPSWTFYIQVMTFNEAETFPFNPFDLTKVWPHKDYPLIPVGKLVLNRNPVNYFAEVEQIAFDPSNMPPGIEASPDKMLQGRLFAYPDTHRHRLGPNYLHIPVNCPYRARVANYQRDGPMCMQDNQGGAPNYYPNSFGAPEQQPSALEHSIQYSGEVRRFNTANDDNVTQVRAFYVNVLNEEQRKRLCENIAGHLKDAQIFIQKKAVKNFTEVHPDYGSHIQALLDKYNAEKPKNAIHTFVQSGSHLAAREKANL

SEQ ID NO: 118 - protein, 524 aa, Artificial Sequence
  Artificial mutant polypeptide
  MUTAGEN (328)..(328)
ADSRDPASDQMQHWKEQRAAQKADVLTTGAGNPVGDKLNVITVGPRGPLLVQDVVFTDEAHFDRERIPERVVHAKGAGAFGYFEVTHDITKYSKAKVFEHIGKKTPIAVRFSTVAGESGSADTVRDPRGFAVKFYTEDGNWDLVGNNTPIFFIRDPILFPSFIHSQKRNPQTHLKDPDVWDFWSLRPESLHQVSFLFSDRGIPDGHRHMNGYGSHTFKLVNANGEAVYCKFHYKTDQGIKNLSVEDAARLSQEDPDYGIRDLFNAIATGKYPSWTFYIQVMTFNQAETFPFNPFDLTKVWPHKDYPLIPVGKLVLNRNPVNYFAEVEEIAFDPSNMPPGIEASPDKMLQGRLFAYPDTHRHRLGPNYLHIPVNCPYRARVANYQRDGPMCMQDNQGGAPNYYPNSFGAPEQQPSALEHSIQYSGEVRRFNTANDDNVTQVRAFYVNVLNEEQRKRLCENIAGHLKDAQIFIQKKAVKNFTEVHPDYGSHIQALLDKYNAEKPKNAIHTFVQSGSHLAAREKANL

SEQ ID NO: 119 - protein, 524 aa, Artificial Sequence
  Artificial mutant polypeptide
  MUTAGEN (349)..(349)
ADSRDPASDQMQHWKEQRAAQKADVLTTGAGNPVGDKLNVITVGPRGPLLVQDVVFTDEAHFDRERIPERVVHAKGAGAFGYFEVTHDITKYSKAKVFEHIGKKTPIAVRFSTVAGESGSADTVRDPRGFAVKFYTEDGNWDLVGNNTPIFFIRDPILFPSFIHSQKRNPQTHLKDPDVWDFWSLRPESLHQVSFLFSDRGIPDGHRHMNGYGSHTFKLVNANGEAVYCKFHYKTDQGIKNLSVEDAARLSQEDPDYGIRDLFNAIATGKYPSWTFYIQVMTFNQAETFPFNPFDLTKVWPHKDYPLIPVGKLVLNRNPVNYFAEVEQIAFDPSNMPPGIEASPDKMLEGRLFAYPDTHRHRLGPNYLHIPVNCPYRARVANYQRDGPMCMQDNQGGAPNYYPNSFGAPEQQPSALEHSIQYSGEVRRFNTANDDNVTQVRAFYVNVLNEEQRKRLCENIAGHLKDAQIFIQKKAVKNFTEVHPDYGSHIQALLDKYNAEKPKNAIHTFVQSGSHLAAREKANL

SEQ ID NO: 120 - protein, 524 aa, Artificial Sequence
  Artificial mutant polypeptide
  MUTAGEN (384)..(384)
ADSRDPASDQMQHWKEQRAAQKADVLTTGAGNPVGDKLNVITVGPRGPLLVQDVVFTDEAHFDRERIPERVVHAKGAGAFGYFEVTHDITKYSKAKVFEHIGKKTPIAVRFSTVAGESGSADTVRDPRGFAVKFYTEDGNWDLVGNNTPIFFIRDPILFPSFIHSQKRNPQTHLKDPDVWDFWSLRPESLHQVSFLFSDRGIPDGHRHMNGYGSHTFKLVNANGEAVYCKFHYKTDQGIKNLSVEDAARLSQEDPDYGIRDLFNAIATGKYPSWTFYIQVMTFNQAETFPFNPFDLTKVWPHKDYPLIPVGKLVLNRNPVNYFAEVEQIAFDPSNMPPGIEASPDKMLQGRLFAYPDTHRHRLGPNYLHIPVNCPYRARVANYERDGPMCMQDNQGGAPNYYPNSFGAPEQQPSALEHSIQYSGEVRRFNTANDDNVTQVRAFYVNVLNEEQRKRLCENIAGHLKDAQIFIQKKAVKNFTEVHPDYGSHIQALLDKYNAEKPKNAIHTFVQSGSHLAAREKANL

SEQ ID NO: 121 - protein, 524 aa, Artificial Sequence
  Artificial mutant polypeptide
  MUTAGEN (392)..(392)
ADSRDPASDQMQHWKEQRAAQKADVLTTGAGNPVGDKLNVITVGPRGPLLVQDVVFTDEAHFDRERIPERVVHAKGAGAFGYFEVTHDITKYSKAKVFEHIGKKTPIAVRFSTVAGESGSADTVRDPRGFAVKFYTEDGNWDLVGNNTPIFFIRDPILFPSFIHSQKRNPQTHLKDPDVWDFWSLRPESLHQVSFLFSDRGIPDGHRHMNGYGSHTFKLVNANGEAVYCKFHYKTDQGIKNLSVEDAARLSQEDPDYGIRDLFNAIATGKYPSWTFYIQVMTFNQAETFPFNPFDLTKVWPHKDYPLIPVGKLVLNRNPVNYFAEVEQIAFDPSNMPPGIEASPDKMLQGRLFAYPDTHRHRLGPNYLHIPVNCPYRARVANYQRDGPMCMEDNQGGAPNYYPNSFGAPEQQPSALEHSIQYSGEVRRFNTANDDNVTQVRAFYVNVLNEEQRKRLCENIAGHLKDAQIFIQKKAVKNFTEVHPDYGSHIQALLDKYNAEKPKNAIHTFVQSGSHLAAREKANL

SEQ ID NO: 122 - protein, 524 aa, Artificial Sequence
  Artificial mutant polypeptide
  MUTAGEN (395)..(395)
ADSRDPASDQMQHWKEQRAAQKADVLTTGAGNPVGDKLNVITVGPRGPLLVQDVVFTDEAHFDRERIPERVVHAKGAGAFGYFEVTHDITKYSKAKVFEHIGKKTPIAVRFSTVAGESGSADTVRDPRGFAVKFYTEDGNWDLVGNNTPIFFIRDPILFPSFIHSQKRNPQTHLKDPDVWDFWSLRPESLHQVSFLFSDRGIPDGHRHMNGYGSHTFKLVNANGEAVYCKFHYKTDQGIKNLSVEDAARLSQEDPDYGIRDLFNAIATGKYPSWTFYIQVMTFNQAETFPFNPFDLTKVWPHKDYPLIPVGKLVLNRNPVNYFAEVEQIAFDPSNMPPGIEASPDKMLQGRLFAYPDTHRHRLGPNYLHIPVNCPYRARVANYQRDGPMCMQDNEGGAPNYYPNSFGAPEQQPSALEHSIQYSGEVRRFNTANDDNVTQVRAFYVNVLNEEQRKRLCENIAGHLKDAQIFIQKKAVKNFTEVHPDYGSHIQALLDKYNAEKPKNAIHTFVQSGSHLAAREKANL

SEQ ID NO: 123 - protein, 524 aa, Artificial Sequence
  Artificial mutant polypeptide
  MUTAGEN (411)..(411)
ADSRDPASDQMQHWKEQRAAQKADVLTTGAGNPVGDKLNVITVGPRGPLLVQDVVFTDEAHFDRERIPERVVHAKGAGAFGYFEVTHDITKYSKAKVFEHIGKKTPIAVRFSTVAGESGSADTVRDPRGFAVKFYTEDGNWDLVGNNTPIFFIRDPILFPSFIHSQKRNPQTHLKDPDVWDFWSLRPESLHQVSFLFSDRGIPDGHRHMNGYGSHTFKLVNANGEAVYCKFHYKTDQGIKNLSVEDAARLSQEDPDYGIRDLFNAIATGKYPSWTFYIQVMTFNQAETFPFNPFDLTKVWPHKDYPLIPVGKLVLNRNPVNYFAEVEQIAFDPSNMPPGIEASPDKMLQGRLFAYPDTHRHRLGPNYLHIPVNCPYRARVANYQRDGPMCMQDNQGGAPNYYPNSFGAPEEQPSALEHSIQYSGEVRRFNTANDDNVTQVRAFYVNVLNEEQRKRLCENIAGHLKDAQIFIQKKAVKNFTEVHPDYGSHIQALLDKYNAEKPKNAIHTFVQSGSHLAAREKANL

SEQ ID NO: 124 - protein, 524 aa, Artificial Sequence
  Artificial mutant polypeptide
  MUTAGEN (412)..(412)
ADSRDPASDQMQHWKEQRAAQKADVLTTGAGNPVGDKLNVITVGPRGPLLVQDVVFTDEAHFDRERIPERVVHAKGAGAFGYFEVTHDITKYSKAKVFEHIGKKTPIAVRFSTVAGESGSADTVRDPRGFAVKFYTEDGNWDLVGNNTPIFFIRDPILFPSFIHSQKRNPQTHLKDPDVWDFWSLRPESLHQVSFLFSDRGIPDGHRHMNGYGSHTFKLVNANGEAVYCKFHYKTDQGIKNLSVEDAARLSQEDPDYGIRDLFNAIATGKYPSWTFYIQVMTFNQAETFPFNPFDLTKVWPHKDYPLIPVGKLVLNRNPVNYFAEVEQIAFDPSNMPPGIEASPDKMLQGRLFAYPDTHRHRLGPNYLHIPVNCPYRARVANYQRDGPMCMQDNQGGAPNYYPNSFGAPEQEPSALEHSIQYSGEVRRFNTANDDNVTQVRAFYVNVLNEEQRKRLCENIAGHLKDAQIFIQKKAVKNFTEVHPDYGSHIQALLDKYNAEKPKNAIHTFVQSGSHLAAREKANL

SEQ ID NO: 125 - protein, 524 aa, Artificial Sequence
  Artificial mutant polypeptide
  MUTAGEN (421)..(421)
ADSRDPASDQMQHWKEQRAAQKADVLTTGAGNPVGDKLNVITVGPRGPLLVQDVVFTDEAHFDRERIPERVVHAKGAGAFGYFEVTHDITKYSKAKVFEHIGKKTPIAVRFSTVAGESGSADTVRDPRGFAVKFYTEDGNWDLVGNNTPIFFIRDPILFPSFIHSQKRNPQTHLKDPDVWDFWSLRPESLHQVSFLFSDRGIPDGHRHMNGYGSHTFKLVNANGEAVYCKFHYKTDQGIKNLSVEDAARLSQEDPDYGIRDLFNAIATGKYPSWTFYIQVMTFNQAETFPFNPFDLTKVWPHKDYPLIPVGKLVLNRNPVNYFAEVEQIAFDPSNMPPGIEASPDKMLQGRLFAYPDTHRHRLGPNYLHIPVNCPYRARVANYQRDGPMCMQDNQGGAPNYYPNSFGAPEQQPSALEHSIEYSGEVRRFNTANDDNVTQVRAFYVNVLNEEQRKRLCENIAGHLKDAQIFIQKKAVKNFTEVHPDYGSHIQALLDKYNAEKPKNAIHTFVQSGSHLAAREKANL

SEQ ID NO: 126 - protein, 524 aa, Artificial Sequence
  Artificial mutant polypeptide
  MUTAGEN (439)..(439)
ADSRDPASDQMQHWKEQRAAQKADVLTTGAGNPVGDKLNVITVGPRGPLLVQDVVFTDEAHFDRERIPERVVHAKGAGAFGYFEVTHDITKYSKAKVFEHIGKKTPIAVRFSTVAGESGSADTVRDPRGFAVKFYTEDGNWDLVGNNTPIFFIRDPILFPSFIHSQKRNPQTHLKDPDVWDFWSLRPESLHQVSFLFSDRGIPDGHRHMNGYGSHTFKLVNANGEAVYCKFHYKTDQGIKNLSVEDAARLSQEDPDYGIRDLFNAIATGKYPSWTFYIQVMTFNQAETFPFNPFDLTKVWPHKDYPLIPVGKLVLNRNPVNYFAEVEQIAFDPSNMPPGIEASPDKMLQGRLFAYPDTHRHRLGPNYLHIPVNCPYRARVANYQRDGPMCMQDNQGGAPNYYPNSFGAPEQQPSALEHSIQYSGEVRRFNTANDDNVTEVRAFYVNVLNEEQRKRLCENIAGHLKDAQIFIQKKAVKNFTEVHPDYGSHIQALLDKYNAEKPKNAIHTFVQSGSHLAAREKANL

SEQ ID NO: 127 - protein, 524 aa, Artificial Sequence
  Artificial mutant polypeptide
  MUTAGEN (452)..(452)
ADSRDPASDQMQHWKEQRAAQKADVLTTGAGNPVGDKLNVITVGPRGPLLVQDVVFTDEAHFDRERIPERVVHAKGAGAFGYFEVTHDITKYSKAKVFEHIGKKTPIAVRFSTVAGESGSADTVRDPRGFAVKFYTEDGNWDLVGNNTPIFFIRDPILFPSFIHSQKRNPQTHLKDPDVWDFWSLRPESLHQVSFLFSDRGIPDGHRHMNGYGSHTFKLVNANGEAVYCKFHYKTDQGIKNLSVEDAARLSQEDPDYGIRDLFNAIATGKYPSWTFYIQVMTFNQAETFPFNPFDLTKVWPHKDYPLIPVGKLVLNRNPVNYFAEVEQIAFDPSNMPPGIEASPDKMLQGRLFAYPDTHRHRLGPNYLHIPVNCPYRARVANYQRDGPMCMQDNQGGAPNYYPNSFGAPEQQPSALEHSIQYSGEVRRFNTANDDNVTQVRAFYVNVLNEEERKRLCENIAGHLKDAQIFIQKKAVKNFTEVHPDYGSHIQALLDKYNAEKPKNAIHTFVQSGSHLAAREKANL

SEQ ID NO: 128 - protein, 524 aa, Artificial Sequence
  Artificial mutant polypeptide
  MUTAGEN (468)..(468)
ADSRDPASDQMQHWKEQRAAQKADVLTTGAGNPVGDKLNVITVGPRGPLLVQDVVFTDEAHFDRERIPERVVHAKGAGAFGYFEVTHDITKYSKAKVFEHIGKKTPIAVRFSTVAGESGSADTVRDPRGFAVKFYTEDGNWDLVGNNTPIFFIRDPILFPSFIHSQKRNPQTHLKDPDVWDFWSLRPESLHQVSFLFSDRGIPDGHRHMNGYGSHTFKLVNANGEAVYCKFHYKTDQGIKNLSVEDAARLSQEDPDYGIRDLFNAIATGKYPSWTFYIQVMTFNQAETFPFNPFDLTKVWPHKDYPLIPVGKLVLNRNPVNYFAEVEQIAFDPSNMPPGIEASPDKMLQGRLFAYPDTHRHRLGPNYLHIPVNCPYRARVANYQRDGPMCMQDNQGGAPNYYPNSFGAPEQQPSALEHSIQYSGEVRRFNTANDDNVTQVRAFYVNVLNEEQRKRLCENIAGHLKDAEIFIQKKAVKNFTEVHPDYGSHIQALLDKYNAEKPKNAIHTFVQSGSHLAAREKANL

SEQ ID NO: 129 - protein, 524 aa, Artificial Sequence
  Artificial mutant polypeptide
  MUTAGEN (472)..(472)
ADSRDPASDQMQHWKEQRAAQKADVLTTGAGNPVGDKLNVITVGPRGPLLVQDVVFTDEAHFDRERIPERVVHAKGAGAFGYFEVTHDITKYSKAKVFEHIGKKTPIAVRFSTVAGESGSADTVRDPRGFAVKFYTEDGNWDLVGNNTPIFFIRDPILFPSFIHSQKRNPQTHLKDPDVWDFWSLRPESLHQVSFLFSDRGIPDGHRHMNGYGSHTFKLVNANGEAVYCKFHYKTDQGIKNLSVEDAARLSQEDPDYGIRDLFNAIATGKYPSWTFYIQVMTFNQAETFPFNPFDLTKVWPHKDYPLIPVGKLVLNRNPVNYFAEVEQIAFDPSNMPPGIEASPDKMLQGRLFAYPDTHRHRLGPNYLHIPVNCPYRARVANYQRDGPMCMQDNQGGAPNYYPNSFGAPEQQPSALEHSIQYSGEVRRFNTANDDNVTQVRAFYVNVLNEEQRKRLCENIAGHLKDAQIFIEKKAVKNFTEVHPDYGSHIQALLDKYNAEKPKNAIHTFVQSGSHLAAREKANL

SEQ ID NO: 130 - protein, 524 aa, Artificial Sequence
  Artificial mutant polypeptide
  MUTAGEN (491)..(491)
ADSRDPASDQMQHWKEQRAAQKADVLTTGAGNPVGDKLNVITVGPRGPLLVQDVVFTDEAHFDRERIPERVVHAKGAGAFGYFEVTHDITKYSKAKVFEHIGKKTPIAVRFSTVAGESGSADTVRDPRGFAVKFYTEDGNWDLVGNNTPIFFIRDPILFPSFIHSQKRNPQTHLKDPDVWDFWSLRPESLHQVSFLFSDRGIPDGHRHMNGYGSHTFKLVNANGEAVYCKFHYKTDQGIKNLSVEDAARLSQEDPDYGIRDLFNAIATGKYPSWTFYIQVMTFNQAETFPFNPFDLTKVWPHKDYPLIPVGKLVLNRNPVNYFAEVEQIAFDPSNMPPGIEASPDKMLQGRLFAYPDTHRHRLGPNYLHIPVNCPYRARVANYQRDGPMCMQDNQGGAPNYYPNSFGAPEQQPSALEHSIQYSGEVRRFNTANDDNVTQVRAFYVNVLNEEQRKRLCENIAGHLKDAQIFIQKKAVKNFTEVHPDYGSHIEALLDKYNAEKPKNAIHTFVQSGSHLAAREKANL

SEQ ID NO: 131 - protein, 524 aa, Artificial Sequence
  Artificial mutant polypeptide
  MUTAGEN (511)..(511)
ADSRDPASDQMQHWKEQRAAQKADVLTTGAGNPVGDKLNVITVGPRGPLLVQDVVFTDEAHFDRERIPERVVHAKGAGAFGYFEVTHDITKYSKAKVFEHIGKKTPIAVRFSTVAGESGSADTVRDPRGFAVKFYTEDGNWDLVGNNTPIFFIRDPILFPSFIHSQKRNPQTHLKDPDVWDFWSLRPESLHQVSFLFSDRGIPDGHRHMNGYGSHTFKLVNANGEAVYCKFHYKTDQGIKNLSVEDAARLSQEDPDYGIRDLFNAIATGKYPSWTFYIQVMTFNQAETFPFNPFDLTKVWPHKDYPLIPVGKLVLNRNPVNYFAEVEQIAFDPSNMPPGIEASPDKMLQGRLFAYPDTHRHRLGPNYLHIPVNCPYRARVANYQRDGPMCMQDNQGGAPNYYPNSFGAPEQQPSALEHSIQYSGEVRRFNTANDDNVTQVRAFYVNVLNEEQRKRLCENIAGHLKDAQIFIQKKAVKNFTEVHPDYGSHIQALLDKYNAEKPKNAIHTFVESGSHLAAREKANL

SEQ ID NO: 132 - protein, 524 aa, Artificial Sequence
  Artificial mutant polypeptide
  MUTAGEN (2)..(2)
ANSRDPASDQMQHWKEQRAAQKADVLTTGAGNPVGDKLNVITVGPRGPLLVQDVVFTDEAHFDRERIPERVVHAKGAGAFGYFEVTHDITKYSKAKVFEHIGKKTPIAVRFSTVAGESGSADTVRDPRGFAVKFYTEDGNWDLVGNNTPIFFIRDPILFPSFIHSQKRNPQTHLKDPDVWDFWSLRPESLHQVSFLFSDRGIPDGHRHMNGYGSHTFKLVNANGEAVYCKFHYKTDQGIKNLSVEDAARLSQEDPDYGIRDLFNAIATGKYPSWTFYIQVMTFNQAETFPFNPFDLTKVWPHKDYPLIPVGKLVLNRNPVNYFAEVEQIAFDPSNMPPGIEASPDKMLQGRLFAYPDTHRHRLGPNYLHIPVNCPYRARVANYQRDGPMCMQDNQGGAPNYYPNSFGAPEQQPSALEHSIQYSGEVRRFNTANDDNVTQVRAFYVNVLNEEQRKRLCENIAGHLKDAQIFIQKKAVKNFTEVHPDYGSHIQALLDKYNAEKPKNAIHTFVQSGSHLAAREKANL

SEQ ID NO: 133 - protein, 524 aa, Artificial Sequence
  Artificial mutant polypeptide
  MUTAGEN (5)..(5)
ADSRNPASDQMQHWKEQRAAQKADVLTTGAGNPVGDKLNVITVGPRGPLLVQDVVFTDEAHFDRERIPERVVHAKGAGAFGYFEVTHDITKYSKAKVFEHIGKKTPIAVRFSTVAGESGSADTVRDPRGFAVKFYTEDGNWDLVGNNTPIFFIRDPILFPSFIHSQKRNPQTHLKDPDVWDFWSLRPESLHQVSFLFSDRGIPDGHRHMNGYGSHTFKLVNANGEAVYCKFHYKTDQGIKNLSVEDAARLSQEDPDYGIRDLFNAIATGKYPSWTFYIQVMTFNQAETFPFNPFDLTKVWPHKDYPLIPVGKLVLNRNPVNYFAEVEQIAFDPSNMPPGIEASPDKMLQGRLFAYPDTHRHRLGPNYLHIPVNCPYRARVANYQRDGPMCMQDNQGGAPNYYPNSFGAPEQQPSALEHSIQYSGEVRRFNTANDDNVTQVRAFYVNVLNEEQRKRLCENIAGHLKDAQIFIQKKAVKNFTEVHPDYGSHIQALLDKYNAEKPKNAIHTFVQSGSHLAAREKANL

SEQ ID NO: 134 - protein, 524 aa, Artificial Sequence
  Artificial mutant polypeptide
  MUTAGEN (9)..(9)
ADSRDPASNQMQHWKEQRAAQKADVLTTGAGNPVGDKLNVITVGPRGPLLVQDVVFTDEAHFDRERIPERVVHAKGAGAFGYFEVTHDITKYSKAKVFEHIGKKTPIAVRFSTVAGESGSADTVRDPRGFAVKFYTEDGNWDLVGNNTPIFFIRDPILFPSFIHSQKRNPQTHLKDPDVWDFWSLRPESLHQVSFLFSDRGIPDGHRHMNGYGSHTFKLVNANGEAVYCKFHYKTDQGIKNLSVEDAARLSQEDPDYGIRDLFNAIATGKYPSWTFYIQVMTFNQAETFPFNPFDLTKVWPHKDYPLIPVGKLVLNRNPVNYFAEVEQIAFDPSNMPPGIEASPDKMLQGRLFAYPDTHRHRLGPNYLHIPVNCPYRARVANYQRDGPMCMQDNQGGAPNYYPNSFGAPEQQPSALEHSIQYSGEVRRFNTANDDNVTQVRAFYVNVLNEEQRKRLCENIAGHLKDAQIFIQKKAVKNFTEVHPDYGSHIQALLDKYNAEKPKNAIHTFVQSGSHLAAREKANL

SEQ ID NO: 135 - protein, 524 aa, Artificial Sequence
  Artificial mutant polypeptide
  MUTAGEN (24)..(24)
ADSRDPASDQMQHWKEQRAAQKANVLTTGAGNPVGDKLNVITVGPRGPLLVQDVVFTDEAHFDRERIPERVVHAKGAGAFGYFEVTHDITKYSKAKVFEHIGKKTPIAVRFSTVAGESGSADTVRDPRGFAVKFYTEDGNWDLVGNNTPIFFIRDPILFPSFIHSQKRNPQTHLKDPDVWDFWSLRPESLHQVSFLFSDRGIPDGHRHMNGYGSHTFKLVNANGEAVYCKFHYKTDQGIKNLSVEDAARLSQEDPDYGIRDLFNAIATGKYPSWTFYIQVMTFNQAETFPFNPFDLTKVWPHKDYPLIPVGKLVLNRNPVNYFAEVEQIAFDPSNMPPGIEASPDKMLQGRLFAYPDTHRHRLGPNYLHIPVNCPYRARVANYQRDGPMCMQDNQGGAPNYYPNSFGAPEQQPSALEHSIQYSGEVRRFNTANDDNVTQVRAFYVNVLNEEQRKRLCENIAGHLKDAQIFIQKKAVKNFTEVHPDYGSHIQALLDKYNAEKPKNAIHTFVQSGSHLAAREKANL

SEQ ID NO: 136 - protein, 524 aa, Artificial Sequence
  Artificial mutant polypeptide
  MUTAGEN (36)..(36)
ADSRDPASDQMQHWKEQRAAQKADVLTTGAGNPVGNKLNVITVGPRGPLLVQDVVFTDEAHFDRERIPERVVHAKGAGAFGYFEVTHDITKYSKAKVFEHIGKKTPIAVRFSTVAGESGSADTVRDPRGFAVKFYTEDGNWDLVGNNTPIFFIRDPILFPSFIHSQKRNPQTHLKDPDVWDFWSLRPESLHQVSFLFSDRGIPDGHRHMNGYGSHTFKLVNANGEAVYCKFHYKTDQGIKNLSVEDAARLSQEDPDYGIRDLFNAIATGKYPSWTFYIQVMTFNQAETFPFNPFDLTKVWPHKDYPLIPVGKLVLNRNPVNYFAEVEQIAFDPSNMPPGIEASPDKMLQGRLFAYPDTHRHRLGPNYLHIPVNCPYRARVANYQRDGPMCMQDNQGGAPNYYPNSFGAPEQQPSALEHSIQYSGEVRRFNTANDDNVTQVRAFYVNVLNEEQRKRLCENIAGHLKDAQIFIQKKAVKNFTEVHPDYGSHIQALLDKYNAEKPKNAIHTFVQSGSHLAAREKANL

SEQ ID NO: 137 - protein, 524 aa, Artificial Sequence
  Artificial mutant polypeptide
  MUTAGEN (53)..(53)
ADSRDPASDQMQHWKEQRAAQKADVLTTGAGNPVGDKLNVITVGPRGPLLVQNVVFTDEAHFDRERIPERVVHAKGAGAFGYFEVTHDITKYSKAKVFEHIGKKTPIAVRFSTVAGESGSADTVRDPRGFAVKFYTEDGNWDLVGNNTPIFFIRDPILFPSFIHSQKRNPQTHLKDPDVWDFWSLRPESLHQVSFLFSDRGIPDGHRHMNGYGSHTFKLVNANGEAVYCKFHYKTDQGIKNLSVEDAARLSQEDPDYGIRDLFNAIATGKYPSWTFYIQVMTFNQAETFPFNPFDLTKVWPHKDYPLIPVGKLVLNRNPVNYFAEVEQIAFDPSNMPPGIEASPDKMLQGRLFAYPDTHRHRLGPNYLHIPVNCPYRARVANYQRDGPMCMQDNQGGAPNYYPNSFGAPEQQPSALEHSIQYSGEVRRFNTANDDNVTQVRAFYVNVLNEEQRKRLCENIAGHLKDAQIFIQKKAVKNFTEVHPDYGSHIQALLDKYNAEKPKNAIHTFVQSGSHLAAREKANL

SEQ ID NO: 138 - protein, 524 aa, Artificial Sequence
  Artificial mutant polypeptide
  MUTAGEN (58)..(58)
ADSRDPASDQMQHWKEQRAAQKADVLTTGAGNPVGDKLNVITVGPRGPLLVQDVVFTNEAHFDRERIPERVVHAKGAGAFGYFEVTHDITKYSKAKVFEHIGKKTPIAVRFSTVAGESGSADTVRDPRGFAVKFYTEDGNWDLVGNNTPIFFIRDPILFPSFIHSQKRNPQTHLKDPDVWDFWSLRPESLHQVSFLFSDRGIPDGHRHMNGYGSHTFKLVNANGEAVYCKFHYKTDQGIKNLSVEDAARLSQEDPDYGIRDLFNAIATGKYPSWTFYIQVMTFNQAETFPFNPFDLTKVWPHKDYPLIPVGKLVLNRNPVNYFAEVEQIAFDPSNMPPGIEASPDKMLQGRLFAYPDTHRHRLGPNYLHIPVNCPYRARVANYQRDGPMCMQDNQGGAPNYYPNSFGAPEQQPSALEHSIQYSGEVRRFNTANDDNVTQVRAFYVNVLNEEQRKRLCENIAGHLKDAQIFIQKKAVKNFTEVHPDYGSHIQALLDKYNAEKPKNAIHTFVQSGSHLAAREKANL

SEQ ID NO: 139 - protein, 524 aa, Artificial Sequence
  Artificial mutant polypeptide
  MUTAGEN (63)..(63)
ADSRDPASDQMQHWKEQRAAQKADVLTTGAGNPVGDKLNVITVGPRGPLLVQDVVFTDEAHFNRERIPERVVHAKGAGAFGYFEVTHDITKYSKAKVFEHIGKKTPIAVRFSTVAGESGSADTVRDPRGFAVKFYTEDGNWDLVGNNTPIFFIRDPILFPSFIHSQKRNPQTHLKDPDVWDFWSLRPESLHQVSFLFSDRGIPDGHRHMNGYGSHTFKLVNANGEAVYCKFHYKTDQGIKNLSVEDAARLSQEDPDYGIRDLFNAIATGKYPSWTFYIQVMTFNQAETFPFNPFDLTKVWPHKDYPLIPVGKLVLNRNPVNYFAEVEQIAFDPSNMPPGIEASPDKMLQGRLFAYPDTHRHRLGPNYLHIPVNCPYRARVANYQRDGPMCMQDNQGGAPNYYPNSFGAPEQQPSALEHSIQYSGEVRRFNTANDDNVTQVRAFYVNVLNEEQRKRLCENIAGHLKDAQIFIQKKAVKNFTEVHPDYGSHIQALLDKYNAEKPKNAIHTFVQSGSHLAAREKANL

SEQ ID NO: 140 - protein, 524 aa, Artificial Sequence
  Artificial mutant polypeptide
  MUTAGEN (88)..(88)
ADSRDPASDQMQHWKEQRAAQKADVLTTGAGNPVGDKLNVITVGPRGPLLVQDVVFTDEAHFDRERIPERVVHAKGAGAFGYFEVTHNITKYSKAKVFEHIGKKTPIAVRFSTVAGESGSADTVRDPRGFAVKFYTEDGNWDLVGNNTPIFFIRDPILFPSFIHSQKRNPQTHLKDPDVWDFWSLRPESLHQVSFLFSDRGIPDGHRHMNGYGSHTFKLVNANGEAVYCKFHYKTDQGIKNLSVEDAARLSQEDPDYGIRDLFNAIATGKYPSWTFYIQVMTFNQAETFPFNPFDLTKVWPHKDYPLIPVGKLVLNRNPVNYFAEVEQIAFDPSNMPPGIEASPDKMLQGRLFAYPDTHRHRLGPNYLHIPVNCPYRARVANYQRDGPMCMQDNQGGAPNYYPNSFGAPEQQPSALEHSIQYSGEVRRFNTANDDNVTQVRAFYVNVLNEEQRKRLCENIAGHLKDAQIFIQKKAVKNFTEVHPDYGSHIQALLDKYNAEKPKNAIHTFVQSGSHLAAREKANL

SEQ ID NO: 141 - protein, 524 aa, Artificial Sequence
  Artificial mutant polypeptide
  MUTAGEN (122)..(122)
ADSRDPASDQMQHWKEQRAAQKADVLTTGAGNPVGDKLNVITVGPRGPLLVQDVVFTDEAHFDRERIPERVVHAKGAGAFGYFEVTHDITKYSKAKVFEHIGKKTPIAVRFSTVAGESGSANTVRDPRGFAVKFYTEDGNWDLVGNNTPIFFIRDPILFPSFIHSQKRNPQTHLKDPDVWDFWSLRPESLHQVSFLFSDRGIPDGHRHMNGYGSHTFKLVNANGEAVYCKFHYKTDQGIKNLSVEDAARLSQEDPDYGIRDLFNAIATGKYPSWTFYIQVMTFNQAETFPFNPFDLTKVWPHKDYPLIPVGKLVLNRNPVNYFAEVEQIAFDPSNMPPGIEASPDKMLQGRLFAYPDTHRHRLGPNYLHIPVNCPYRARVANYQRDGPMCMQDNQGGAPNYYPNSFGAPEQQPSALEHSIQYSGEVRRFNTANDDNVTQVRAFYVNVLNEEQRKRLCENIAGHLKDAQIFIQKKAVKNFTEVHPDYGSHIQALLDKYNAEKPKNAIHTFVQSGSHLAAREKANL

SEQ ID NO: 142 - protein, 524 aa, Artificial Sequence
  Artificial mutant polypeptide
  MUTAGEN (126)..(126)
ADSRDPASDQMQHWKEQRAAQKADVLTTGAGNPVGDKLNVITVGPRGPLLVQDVVFTDEAHFDRERIPERVVHAKGAGAFGYFEVTHDITKYSKAKVFEHIGKKTPIAVRFSTVAGESGSADTVRNPRGFAVKFYTEDGNWDLVGNNTPIFFIRDPILFPSFIHSQKRNPQTHLKDPDVWDFWSLRPESLHQVSFLFSDRGIPDGHRHMNGYGSHTFKLVNANGEAVYCKFHYKTDQGIKNLSVEDAARLSQEDPDYGIRDLFNAIATGKYPSWTFYIQVMTFNQAETFPFNPFDLTKVWPHKDYPLIPVGKLVLNRNPVNYFAEVEQIAFDPSNMPPGIEASPDKMLQGRLFAYPDTHRHRLGPNYLHIPVNCPYRARVANYQRDGPMCMQDNQGGAPNYYPNSFGAPEQQPSALEHSIQYSGEVRRFNTANDDNVTQVRAFYVNVLNEEQRKRLCENIAGHLKDAQIFIQKKAVKNFTEVHPDYGSHIQALLDKYNAEKPKNAIHTFVQSGSHLAAREKANL

SEQ ID NO: 143 - protein, 524 aa, Artificial Sequence
  Artificial mutant polypeptide
  MUTAGEN (138)..(138)
ADSRDPASDQMQHWKEQRAAQKADVLTTGAGNPVGDKLNVITVGPRGPLLVQDVVFTDEAHFDRERIPERVVHAKGAGAFGYFEVTHDITKYSKAKVFEHIGKKTPIAVRFSTVAGESGSADTVRDPRGFAVKFYTENGNWDLVGNNTPIFFIRDPILFPSFIHSQKRNPQTHLKDPDVWDFWSLRPESLHQVSFLFSDRGIPDGHRHMNGYGSHTFKLVNANGEAVYCKFHYKTDQGIKNLSVEDAARLSQEDPDYGIRDLFNAIATGKYPSWTFYIQVMTFNQAETFPFNPFDLTKVWPHKDYPLIPVGKLVLNRNPVNYFAEVEQIAFDPSNMPPGIEASPDKMLQGRLFAYPDTHRHRLGPNYLHIPVNCPYRARVANYQRDGPMCMQDNQGGAPNYYPNSFGAPEQQPSALEHSIQYSGEVRRFNTANDDNVTQVRAFYVNVLNEEQRKRLCENIAGHLKDAQIFIQKKAVKNFTEVHPDYGSHIQALLDKYNAEKPKNAIHTFVQSGSHLAAREKANL

SEQ ID NO: 144 - protein, 524 aa, Artificial Sequence
  Artificial mutant polypeptide
  MUTAGEN (142)..(142)
ADSRDPASDQMQHWKEQRAAQKADVLTTGAGNPVGDKLNVITVGPRGPLLVQDVVFTDEAHFDRERIPERVVHAKGAGAFGYFEVTHDITKYSKAKVFEHIGKKTPIAVRFSTVAGESGSADTVRDPRGFAVKFYTEDGNWNLVGNNTPIFFIRDPILFPSFIHSQKRNPQTHLKDPDVWDFWSLRPESLHQVSFLFSDRGIPDGHRHMNGYGSHTFKLVNANGEAVYCKFHYKTDQGIKNLSVEDAARLSQEDPDYGIRDLFNAIATGKYPSWTFYIQVMTFNQAETFPFNPFDLTKVWPHKDYPLIPVGKLVLNRNPVNYFAEVEQIAFDPSNMPPGIEASPDKMLQGRLFAYPDTHRHRLGPNYLHIPVNCPYRARVANYQRDGPMCMQDNQGGAPNYYPNSFGAPEQQPSALEHSIQYSGEVRRFNTANDDNVTQVRAFYVNVLNEEQRKRLCENIAGHLKDAQIFIQKKAVKNFTEVHPDYGSHIQALLDKYNAEKPKNAIHTFVQSGSHLAAREKANL

SEQ ID NO: 145 - protein, 524 aa, Artificial Sequence
  Artificial mutant polypeptide
  MUTAGEN (155)..(155)
ADSRDPASDQMQHWKEQRAAQKADVLTTGAGNPVGDKLNVITVGPRGPLLVQDVVFTDEAHFDRERIPERVVHAKGAGAFGYFEVTHDITKYSKAKVFEHIGKKTPIAVRFSTVAGESGSADTVRDPRGFAVKFYTEDGNWDLVGNNTPIFFIRNPILFPSFIHSQKRNPQTHLKDPDVWDFWSLRPESLHQVSFLFSDRGIPDGHRHMNGYGSHTFKLVNANGEAVYCKFHYKTDQGIKNLSVEDAARLSQEDPDYGIRDLFNAIATGKYPSWTFYIQVMTFNQAETFPFNPFDLTKVWPHKDYPLIPVGKLVLNRNPVNYFAEVEQIAFDPSNMPPGIEASPDKMLQGRLFAYPDTHRHRLGPNYLHIPVNCPYRARVANYQRDGPMCMQDNQGGAPNYYPNSFGAPEQQPSALEHSIQYSGEVRRFNTANDDNVTQVRAFYVNVLNEEQRKRLCENIAGHLKDAQIFIQKKAVKNFTEVHPDYGSHIQALLDKYNAEKPKNAIHTFVQSGSHLAAREKANL

SEQ ID NO: 146 - protein, 524 aa, Artificial Sequence
  Artificial mutant polypeptide
  MUTAGEN (176)..(176)
ADSRDPASDQMQHWKEQRAAQKADVLTTGAGNPVGDKLNVITVGPRGPLLVQDVVFTDEAHFDRERIPERVVHAKGAGAFGYFEVTHDITKYSKAKVFEHIGKKTPIAVRFSTVAGESGSADTVRDPRGFAVKFYTEDGNWDLVGNNTPIFFIRDPILFPSFIHSQKRNPQTHLKNPDVWDFWSLRPESLHQVSFLFSDRGIPDGHRHMNGYGSHTFKLVNANGEAVYCKFHYKTDQGIKNLSVEDAARLSQEDPDYGIRDLFNAIATGKYPSWTFYIQVMTFNQAETFPFNPFDLTKVWPHKDYPLIPVGKLVLNRNPVNYFAEVEQIAFDPSNMPPGIEASPDKMLQGRLFAYPDTHRHRLGPNYLHIPVNCPYRARVANYQRDGPMCMQDNQGGAPNYYPNSFGAPEQQPSALEHSIQYSGEVRRFNTANDDNVTQVRAFYVNVLNEEQRKRLCENIAGHLKDAQIFIQKKAVKNFTEVHPDYGSHIQALLDKYNAEKPKNAIHTFVQSGSHLAAREKANL

SEQ ID NO: 147 - protein, 524 aa, Artificial Sequence
  Artificial mutant polypeptide
  MUTAGEN (178)..(178)
ADSRDPASDQMQHWKEQRAAQKADVLTTGAGNPVGDKLNVITVGPRGPLLVQDVVFTDEAHFDRERIPERVVHAKGAGAFGYFEVTHDITKYSKAKVFEHIGKKTPIAVRFSTVAGESGSADTVRDPRGFAVKFYTEDGNWDLVGNNTPIFFIRDPILFPSFIHSQKRNPQTHLKDPNVWDFWSLRPESLHQVSFLFSDRGIPDGHRHMNGYGSHTFKLVNANGEAVYCKFHYKTDQGIKNLSVEDAARLSQEDPDYGIRDLFNAIATGKYPSWTFYIQVMTFNQAETFPFNPFDLTKVWPHKDYPLIPVGKLVLNRNPVNYFAEVEQIAFDPSNMPPGIEASPDKMLQGRLFAYPDTHRHRLGPNYLHIPVNCPYRARVANYQRDGPMCMQDNQGGAPNYYPNSFGAPEQQPSALEHSIQYSGEVRRFNTANDDNVTQVRAFYVNVLNEEQRKRLCENIAGHLKDAQIFIQKKAVKNFTEVHPDYGSHIQALLDKYNAEKPKNAIHTFVQSGSHLAAREKANL

SEQ ID NO: 148 - protein, 524 aa, Artificial Sequence
  Artificial mutant polypeptide
  MUTAGEN (181)..(181)
ADSRDPASDQMQHWKEQRAAQKADVLTTGAGNPVGDKLNVITVGPRGPLLVQDVVFTDEAHFDRERIPERVVHAKGAGAFGYFEVTHDITKYSKAKVFEHIGKKTPIAVRFSTVAGESGSADTVRDPRGFAVKFYTEDGNWDLVGNNTPIFFIRDPILFPSFIHSQKRNPQTHLKDPDVWNFWSLRPESLHQVSFLFSDRGIPDGHRHMNGYGSHTFKLVNANGEAVYCKFHYKTDQGIKNLSVEDAARLSQEDPDYGIRDLFNAIATGKYPSWTFYIQVMTFNQAETFPFNPFDLTKVWPHKDYPLIPVGKLVLNRNPVNYFAEVEQIAFDPSNMPPGIEASPDKMLQGRLFAYPDTHRHRLGPNYLHIPVNCPYRARVANYQRDGPMCMQDNQGGAPNYYPNSFGAPEQQPSALEHSIQYSGEVRRFNTANDDNVTQVRAFYVNVLNEEQRKRLCENIAGHLKDAQIFIQKKAVKNFTEVHPDYGSHIQALLDKYNAEKPKNAIHTFVQSGSHLAAREKANL

SEQ ID NO: 149 - protein, 524 aa, Artificial Sequence
  Artificial mutant polypeptide
  MUTAGEN (199)..(199)
ADSRDPASDQMQHWKEQRAAQKADVLTTGAGNPVGDKLNVITVGPRGPLLVQDVVFTDEAHFDRERIPERVVHAKGAGAFGYFEVTHDITKYSKAKVFEHIGKKTPIAVRFSTVAGESGSADTVRDPRGFAVKFYTEDGNWDLVGNNTPIFFIRDPILFPSFIHSQKRNPQTHLKDPDVWDFWSLRPESLHQVSFLFSNRGIPDGHRHMNGYGSHTFKLVNANGEAVYCKFHYKTDQGIKNLSVEDAARLSQEDPDYGIRDLFNAIATGKYPSWTFYIQVMTFNQAETFPFNPFDLTKVWPHKDYPLIPVGKLVLNRNPVNYFAEVEQIAFDPSNMPPGIEASPDKMLQGRLFAYPDTHRHRLGPNYLHIPVNCPYRARVANYQRDGPMCMQDNQGGAPNYYPNSFGAPEQQPSALEHSIQYSGEVRRFNTANDDNVTQVRAFYVNVLNEEQRKRLCENIAGHLKDAQIFIQKKAVKNFTEVHPDYGSHIQALLDKYNAEKPKNAIHTFVQSGSHLAAREKANL

SEQ ID NO: 150 - protein, 524 aa, Artificial Sequence
  Artificial mutant polypeptide
  MUTAGEN (204)..(204)
ADSRDPASDQMQHWKEQRAAQKADVLTTGAGNPVGDKLNVITVGPRGPLLVQDVVFTDEAHFDRERIPERVVHAKGAGAFGYFEVTHDITKYSKAKVFEHIGKKTPIAVRFSTVAGESGSADTVRDPRGFAVKFYTEDGNWDLVGNNTPIFFIRDPILFPSFIHSQKRNPQTHLKDPDVWDFWSLRPESLHQVSFLFSDRGIPNGHRHMNGYGSHTFKLVNANGEAVYCKFHYKTDQGIKNLSVEDAARLSQEDPDYGIRDLFNAIATGKYPSWTFYIQVMTFNQAETFPFNPFDLTKVWPHKDYPLIPVGKLVLNRNPVNYFAEVEQIAFDPSNMPPGIEASPDKMLQGRLFAYPDTHRHRLGPNYLHIPVNCPYRARVANYQRDGPMCMQDNQGGAPNYYPNSFGAPEQQPSALEHSIQYSGEVRRFNTANDDNVTQVRAFYVNVLNEEQRKRLCENIAGHLKDAQIFIQKKAVKNFTEVHPDYGSHIQALLDKYNAEKPKNAIHTFVQSGSHLAAREKANL

SEQ ID NO: 151 - protein, 524 aa, Artificial Sequence
  Artificial mutant polypeptide
  MUTAGEN (236)..(236)
ADSRDPASDQMQHWKEQRAAQKADVLTTGAGNPVGDKLNVITVGPRGPLLVQDVVFTDEAHFDRERIPERVVHAKGAGAFGYFEVTHDITKYSKAKVFEHIGKKTPIAVRFSTVAGESGSADTVRDPRGFAVKFYTEDGNWDLVGNNTPIFFIRDPILFPSFIHSQKRNPQTHLKDPDVWDFWSLRPESLHQVSFLFSDRGIPDGHRHMNGYGSHTFKLVNANGEAVYCKFHYKTNQGIKNLSVEDAARLSQEDPDYGIRDLFNAIATGKYPSWTFYIQVMTFNQAETFPFNPFDLTKVWPHKDYPLIPVGKLVLNRNPVNYFAEVEQIAFDPSNMPPGIEASPDKMLQGRLFAYPDTHRHRLGPNYLHIPVNCPYRARVANYQRDGPMCMQDNQGGAPNYYPNSFGAPEQQPSALEHSIQYSGEVRRFNTANDDNVTQVRAFYVNVLNEEQRKRLCENIAGHLKDAQIFIQKKAVKNFTEVHPDYGSHIQALLDKYNAEKPKNAIHTFVQSGSHLAAREKANL

SEQ ID NO: 152 - protein, 524 aa, Artificial Sequence
  Artificial mutant polypeptide
  MUTAGEN (246)..(246)
ADSRDPASDQMQHWKEQRAAQKADVLTTGAGNPVGDKLNVITVGPRGPLLVQDVVFTDEAHFDRERIPERVVHAKGAGAFGYFEVTHDITKYSKAKVFEHIGKKTPIAVRFSTVAGESGSADTVRDPRGFAVKFYTEDGNWDLVGNNTPIFFIRDPILFPSFIHSQKRNPQTHLKDPDVWDFWSLRPESLHQVSFLFSDRGIPDGHRHMNGYGSHTFKLVNANGEAVYCKFHYKTDQGIKNLSVENAARLSQEDPDYGIRDLFNAIATGKYPSWTFYIQVMTFNQAETFPFNPFDLTKVWPHKDYPLIPVGKLVLNRNPVNYFAEVEQIAFDPSNMPPGIEASPDKMLQGRLFAYPDTHRHRLGPNYLHIPVNCPYRARVANYQRDGPMCMQDNQGGAPNYYPNSFGAPEQQPSALEHSIQYSGEVRRFNTANDDNVTQVRAFYVNVLNEEQRKRLCENIAGHLKDAQIFIQKKAVKNFTEVHPDYGSHIQALLDKYNAEKPKNAIHTFVQSGSHLAAREKANL

SEQ ID NO: 153 - protein, 524 aa, Artificial Sequence
  Artificial mutant polypeptide
  MUTAGEN (254)..(254)
ADSRDPASDQMQHWKEQRAAQKADVLTTGAGNPVGDKLNVITVGPRGPLLVQDVVFTDEAHFDRERIPERVVHAKGAGAFGYFEVTHDITKYSKAKVFEHIGKKTPIAVRFSTVAGESGSADTVRDPRGFAVKFYTEDGNWDLVGNNTPIFFIRDPILFPSFIHSQKRNPQTHLKDPDVWDFWSLRPESLHQVSFLFSDRGIPDGHRHMNGYGSHTFKLVNANGEAVYCKFHYKTDQGIKNLSVEDAARLSQENPDYGIRDLFNAIATGKYPSWTFYIQVMTFNQAETFPFNPFDLTKVWPHKDYPLIPVGKLVLNRNPVNYFAEVEQIAFDPSNMPPGIEASPDKMLQGRLFAYPDTHRHRLGPNYLHIPVNCPYRARVANYQRDGPMCMQDNQGGAPNYYPNSFGAPEQQPSALEHSIQYSGEVRRFNTANDDNVTQVRAFYVNVLNEEQRKRLCENIAGHLKDAQIFIQKKAVKNFTEVHPDYGSHIQALLDKYNAEKPKNAIHTFVQSGSHLAAREKANL

SEQ ID NO: 154 - protein, 524 aa, Artificial Sequence
  Artificial mutant polypeptide
  MUTAGEN (256)..(256)
ADSRDPASDQMQHWKEQRAAQKADVLTTGAGNPVGDKLNVITVGPRGPLLVQDVVFTDEAHFDRERIPERVVHAKGAGAFGYFEVTHDITKYSKAKVFEHIGKKTPIAVRFSTVAGESGSADTVRDPRGFAVKFYTEDGNWDLVGNNTPIFFIRDPILFPSFIHSQKRNPQTHLKDPDVWDFWSLRPESLHQVSFLFSDRGIPDGHRHMNGYGSHTFKLVNANGEAVYCKFHYKTDQGIKNLSVEDAARLSQEDPNYGIRDLFNAIATGKYPSWTFYIQVMTFNQAETFPFNPFDLTKVWPHKDYPLIPVGKLVLNRNPVNYFAEVEQIAFDPSNMPPGIEASPDKMLQGRLFAYPDTHRHRLGPNYLHIPVNCPYRARVANYQRDGPMCMQDNQGGAPNYYPNSFGAPEQQPSALEHSIQYSGEVRRFNTANDDNVTQVRAFYVNVLNEEQRKRLCENIAGHLKDAQIFIQKKAVKNFTEVHPDYGSHIQALLDKYNAEKPKNAIHTFVQSGSHLAAREKANL

SEQ ID NO: 155 - protein, 524 aa, Artificial Sequence
  Artificial mutant polypeptide
  MUTAGEN (261)..(261)
ADSRDPASDQMQHWKEQRAAQKADVLTTGAGNPVGDKLNVITVGPRGPLLVQDVVFTDEAHFDRERIPERVVHAKGAGAFGYFEVTHDITKYSKAKVFEHIGKKTPIAVRFSTVAGESGSADTVRDPRGFAVKFYTEDGNWDLVGNNTPIFFIRDPILFPSFIHSQKRNPQTHLKDPDVWDFWSLRPESLHQVSFLFSDRGIPDGHRHMNGYGSHTFKLVNANGEAVYCKFHYKTDQGIKNLSVEDAARLSQEDPDYGIRNLFNAIATGKYPSWTFYIQVMTFNQAETFPFNPFDLTKVWPHKDYPLIPVGKLVLNRNPVNYFAEVEQIAFDPSNMPPGIEASPDKMLQGRLFAYPDTHRHRLGPNYLHIPVNCPYRARVANYQRDGPMCMQDNQGGAPNYYPNSFGAPEQQPSALEHSIQYSGEVRRFNTANDDNVTQVRAFYVNVLNEEQRKRLCENIAGHLKDAQIFIQKKAVKNFTEVHPDYGSHIQALLDKYNAEKPKNAIHTFVQSGSHLAAREKANL

SEQ ID NO: 156 - protein, 524 aa, Artificial Sequence
  Artificial mutant polypeptide
  MUTAGEN (295)..(295)
ADSRDPASDQMQHWKEQRAAQKADVLTTGAGNPVGDKLNVITVGPRGPLLVQDVVFTDEAHFDRERIPERVVHAKGAGAFGYFEVTHDITKYSKAKVFEHIGKKTPIAVRFSTVAGESGSADTVRDPRGFAVKFYTEDGNWDLVGNNTPIFFIRDPILFPSFIHSQKRNPQTHLKDPDVWDFWSLRPESLHQVSFLFSDRGIPDGHRHMNGYGSHTFKLVNANGEAVYCKFHYKTDQGIKNLSVEDAARLSQEDPDYGIRDLFNAIATGKYPSWTFYIQVMTFNQAETFPFNPFNLTKVWPHKDYPLIPVGKLVLNRNPVNYFAEVEQIAFDPSNMPPGIEASPDKMLQGRLFAYPDTHRHRLGPNYLHIPVNCPYRARVANYQRDGPMCMQDNQGGAPNYYPNSFGAPEQQPSALEHSIQYSGEVRRFNTANDDNVTQVRAFYVNVLNEEQRKRLCENIAGHLKDAQIFIQKKAVKNFTEVHPDYGSHIQALLDKYNAEKPKNAIHTFVQSGSHLAAREKANL

SEQ ID NO: 157 - protein, 524 aa, Artificial Sequence
  Artificial mutant polypeptide
  MUTAGEN (304)..(304)
ADSRDPASDQMQHWKEQRAAQKADVLTTGAGNPVGDKLNVITVGPRGPLLVQDVVFTDEAHFDRERIPERVVHAKGAGAFGYFEVTHDITKYSKAKVFEHIGKKTPIAVRFSTVAGESGSADTVRDPRGFAVKFYTEDGNWDLVGNNTPIFFIRDPILFPSFIHSQKRNPQTHLKDPDVWDFWSLRPESLHQVSFLFSDRGIPDGHRHMNGYGSHTFKLVNANGEAVYCKFHYKTDQGIKNLSVEDAARLSQEDPDYGIRDLFNAIATGKYPSWTFYIQVMTFNQAETFPFNPFDLTKVWPHKNYPLIPVGKLVLNRNPVNYFAEVEQIAFDPSNMPPGIEASPDKMLQGRLFAYPDTHRHRLGPNYLHIPVNCPYRARVANYQRDGPMCMQDNQGGAPNYYPNSFGAPEQQPSALEHSIQYSGEVRRFNTANDDNVTQVRAFYVNVLNEEQRKRLCENIAGHLKDAQIFIQKKAVKNFTEVHPDYGSHIQALLDKYNAEKPKNAIHTFVQSGSHLAAREKANL

SEQ ID NO: 158 - protein, 524 aa, Artificial Sequence
  Artificial mutant polypeptide
  MUTAGEN (332)..(332)
ADSRDPASDQMQHWKEQRAAQKADVLTTGAGNPVGDKLNVITVGPRGPLLVQDVVFTDEAHFDRERIPERVVHAKGAGAFGYFEVTHDITKYSKAKVFEHIGKKTPIAVRFSTVAGESGSADTVRDPRGFAVKFYTEDGNWDLVGNNTPIFFIRDPILFPSFIHSQKRNPQTHLKDPDVWDFWSLRPESLHQVSFLFSDRGIPDGHRHMNGYGSHTFKLVNANGEAVYCKFHYKTDQGIKNLSVEDAARLSQEDPDYGIRDLFNAIATGKYPSWTFYIQVMTFNQAETFPFNPFDLTKVWPHKDYPLIPVGKLVLNRNPVNYFAEVEQIAFNPSNMPPGIEASPDKMLQGRLFAYPDTHRHRLGPNYLHIPVNCPYRARVANYQRDGPMCMQDNQGGAPNYYPNSFGAPEQQPSALEHSIQYSGEVRRFNTANDDNVTQVRAFYVNVLNEEQRKRLCENIAGHLKDAQIFIQKKAVKNFTEVHPDYGSHIQALLDKYNAEKPKNAIHTFVQSGSHLAAREKANL

SEQ ID NO: 159 - protein, 524 aa, Artificial Sequence
  Artificial mutant polypeptide
  MUTAGEN (345)..(345)
ADSRDPASDQMQHWKEQRAAQKADVLTTGAGNPVGDKLNVITVGPRGPLLVQDVVFTDEAHFDRERIPERVVHAKGAGAFGYFEVTHDITKYSKAKVFEHIGKKTPIAVRFSTVAGESGSADTVRDPRGFAVKFYTEDGNWDLVGNNTPIFFIRDPILFPSFIHSQKRNPQTHLKDPDVWDFWSLRPESLHQVSFLFSDRGIPDGHRHMNGYGSHTFKLVNANGEAVYCKFHYKTDQGIKNLSVEDAARLSQEDPDYGIRDLFNAIATGKYPSWTFYIQVMTFNQAETFPFNPFDLTKVWPHKDYPLIPVGKLVLNRNPVNYFAEVEQIAFDPSNMPPGIEASPNKMLQGRLFAYPDTHRHRLGPNYLHIPVNCPYRARVANYQRDGPMCMQDNQGGAPNYYPNSFGAPEQQPSALEHSIQYSGEVRRFNTANDDNVTQVRAFYVNVLNEEQRKRLCENIAGHLKDAQIFIQKKAVKNFTEVHPDYGSHIQALLDKYNAEKPKNAIHTFVQSGSHLAAREKANL

SEQ ID NO: 160 - protein, 524 aa, Artificial Sequence
  Artificial mutant polypeptide
  MUTAGEN (357)..(357)
ADSRDPASDQMQHWKEQRAAQKADVLTTGAGNPVGDKLNVITVGPRGPLLVQDVVFTDEAHFDRERIPERVVHAKGAGAFGYFEVTHDITKYSKAKVFEHIGKKTPIAVRFSTVAGESGSADTVRDPRGFAVKFYTEDGNWDLVGNNTPIFFIRDPILFPSFIHSQKRNPQTHLKDPDVWDFWSLRPESLHQVSFLFSDRGIPDGHRHMNGYGSHTFKLVNANGEAVYCKFHYKTDQGIKNLSVEDAARLSQEDPDYGIRDLFNAIATGKYPSWTFYIQVMTFNQAETFPFNPFDLTKVWPHKDYPLIPVGKLVLNRNPVNYFAEVEQIAFDPSNMPPGIEASPDKMLQGRLFAYPNTHRHRLGPNYLHIPVNCPYRARVANYQRDGPMCMQDNQGGAPNYYPNSFGAPEQQPSALEHSIQYSGEVRRFNTANDDNVTQVRAFYVNVLNEEQRKRLCENIAGHLKDAQIFIQKKAVKNFTEVHPDYGSHIQALLDKYNAEKPKNAIHTFVQSGSHLAAREKANL

SEQ ID NO: 161 - protein, 524 aa, Artificial Sequence
  Artificial mutant polypeptide
  MUTAGEN (386)..(386)
ADSRDPASDQMQHWKEQRAAQKADVLTTGAGNPVGDKLNVITVGPRGPLLVQDVVFTDEAHFDRERIPERVVHAKGAGAFGYFEVTHDITKYSKAKVFEHIGKKTPIAVRFSTVAGESGSADTVRDPRGFAVKFYTEDGNWDLVGNNTPIFFIRDPILFPSFIHSQKRNPQTHLKDPDVWDFWSLRPESLHQVSFLFSDRGIPDGHRHMNGYGSHTFKLVNANGEAVYCKFHYKTDQGIKNLSVEDAARLSQEDPDYGIRDLFNAIATGKYPSWTFYIQVMTFNQAETFPFNPFDLTKVWPHKDYPLIPVGKLVLNRNPVNYFAEVEQIAFDPSNMPPGIEASPDKMLQGRLFAYPDTHRHRLGPNYLHIPVNCPYRARVANYQRNGPMCMQDNQGGAPNYYPNSFGAPEQQPSALEHSIQYSGEVRRFNTANDDNVTQVRAFYVNVLNEEQRKRLCENIAGHLKDAQIFIQKKAVKNFTEVHPDYGSHIQALLDKYNAEKPKNAIHTFVQSGSHLAAREKANL

SEQ ID NO: 162 - protein, 524 aa, Artificial Sequence
  Artificial mutant polypeptide
  MUTAGEN (393)..(393)
ADSRDPASDQMQHWKEQRAAQKADVLTTGAGNPVGDKLNVITVGPRGPLLVQDVVFTDEAHFDRERIPERVVHAKGAGAFGYFEVTHDITKYSKAKVFEHIGKKTPIAVRFSTVAGESGSADTVRDPRGFAVKFYTEDGNWDLVGNNTPIFFIRDPILFPSFIHSQKRNPQTHLKDPDVWDFWSLRPESLHQVSFLFSDRGIPDGHRHMNGYGSHTFKLVNANGEAVYCKFHYKTDQGIKNLSVEDAARLSQEDPDYGIRDLFNAIATGKYPSWTFYIQVMTFNQAETFPFNPFDLTKVWPHKDYPLIPVGKLVLNRNPVNYFAEVEQIAFDPSNMPPGIEASPDKMLQGRLFAYPDTHRHRLGPNYLHIPVNCPYRARVANYQRDGPMCMQNNQGGAPNYYPNSFGAPEQQPSALEHSIQYSGEVRRFNTANDDNVTQVRAFYVNVLNEEQRKRLCENIAGHLKDAQIFIQKKAVKNFTEVHPDYGSHIQALLDKYNAEKPKNAIHTFVQSGSHLAAREKANL

SEQ ID NO: 163 - protein, 524 aa, Artificial Sequence
  Artificial mutant polypeptide
  MUTAGEN (434)..(434)
ADSRDPASDQMQHWKEQRAAQKADVLTTGAGNPVGDKLNVITVGPRGPLLVQDVVFTDEAHFDRERIPERVVHAKGAGAFGYFEVTHDITKYSKAKVFEHIGKKTPIAVRFSTVAGESGSADTVRDPRGFAVKFYTEDGNWDLVGNNTPIFFIRDPILFPSFIHSQKRNPQTHLKDPDVWDFWSLRPESLHQVSFLFSDRGIPDGHRHMNGYGSHTFKLVNANGEAVYCKFHYKTDQGIKNLSVEDAARLSQEDPDYGIRDLFNAIATGKYPSWTFYIQVMTFNQAETFPFNPFDLTKVWPHKDYPLIPVGKLVLNRNPVNYFAEVEQIAFDPSNMPPGIEASPDKMLQGRLFAYPDTHRHRLGPNYLHIPVNCPYRARVANYQRDGPMCMQDNQGGAPNYYPNSFGAPEQQPSALEHSIQYSGEVRRFNTANNDNVTQVRAFYVNVLNEEQRKRLCENIAGHLKDAQIFIQKKAVKNFTEVHPDYGSHIQALLDKYNAEKPKNAIHTFVQSGSHLAAREKANL

SEQ ID NO: 164 - protein, 524 aa, Artificial Sequence
  Artificial mutant polypeptide
  MUTAGEN (435)..(435)
ADSRDPASDQMQHWKEQRAAQKADVLTTGAGNPVGDKLNVITVGPRGPLLVQDVVFTDEAHFDRERIPERVVHAKGAGAFGYFEVTHDITKYSKAKVFEHIGKKTPIAVRFSTVAGESGSADTVRDPRGFAVKFYTEDGNWDLVGNNTPIFFIRDPILFPSFIHSQKRNPQTHLKDPDVWDFWSLRPESLHQVSFLFSDRGIPDGHRHMNGYGSHTFKLVNANGEAVYCKFHYKTDQGIKNLSVEDAARLSQEDPDYGIRDLFNAIATGKYPSWTFYIQVMTFNQAETFPFNPFDLTKVWPHKDYPLIPVGKLVLNRNPVNYFAEVEQIAFDPSNMPPGIEASPDKMLQGRLFAYPDTHRHRLGPNYLHIPVNCPYRARVANYQRDGPMCMQDNQGGAPNYYPNSFGAPEQQPSALEHSIQYSGEVRRFNTANDNNVTQVRAFYVNVLNEEQRKRLCENIAGHLKDAQIFIQKKAVKNFTEVHPDYGSHIQALLDKYNAEKPKNAIHTFVQSGSHLAAREKANL

SEQ ID NO: 165 - protein, 524 aa, Artificial Sequence
  Artificial mutant polypeptide
  MUTAGEN (466)..(466)
ADSRDPASDQMQHWKEQRAAQKADVLTTGAGNPVGDKLNVITVGPRGPLLVQDVVFTDEAHFDRERIPERVVHAKGAGAFGYFEVTHDITKYSKAKVFEHIGKKTPIAVRFSTVAGESGSADTVRDPRGFAVKFYTEDGNWDLVGNNTPIFFIRDPILFPSFIHSQKRNPQTHLKDPDVWDFWSLRPESLHQVSFLFSDRGIPDGHRHMNGYGSHTFKLVNANGEAVYCKFHYKTDQGIKNLSVEDAARLSQEDPDYGIRDLFNAIATGKYPSWTFYIQVMTFNQAETFPFNPFDLTKVWPHKDYPLIPVGKLVLNRNPVNYFAEVEQIAFDPSNMPPGIEASPDKMLQGRLFAYPDTHRHRLGPNYLHIPVNCPYRARVANYQRDGPMCMQDNQGGAPNYYPNSFGAPEQQPSALEHSIQYSGEVRRFNTANDDNVTQVRAFYVNVLNEEQRKRLCENIAGHLKNAQIFIQKKAVKNFTEVHPDYGSHIQALLDKYNAEKPKNAIHTFVQSGSHLAAREKANL

SEQ ID NO: 166 - protein, 524 aa, Artificial Sequence
  Artificial mutant polypeptide
  MUTAGEN (485)..(485)
ADSRDPASDQMQHWKEQRAAQKADVLTTGAGNPVGDKLNVITVGPRGPLLVQDVVFTDEAHFDRERIPERVVHAKGAGAFGYFEVTHDITKYSKAKVFEHIGKKTPIAVRFSTVAGESGSADTVRDPRGFAVKFYTEDGNWDLVGNNTPIFFIRDPILFPSFIHSQKRNPQTHLKDPDVWDFWSLRPESLHQVSFLFSDRGIPDGHRHMNGYGSHTFKLVNANGEAVYCKFHYKTDQGIKNLSVEDAARLSQEDPDYGIRDLFNAIATGKYPSWTFYIQVMTFNQAETFPFNPFDLTKVWPHKDYPLIPVGKLVLNRNPVNYFAEVEQIAFDPSNMPPGIEASPDKMLQGRLFAYPDTHRHRLGPNYLHIPVNCPYRARVANYQRDGPMCMQDNQGGAPNYYPNSFGAPEQQPSALEHSIQYSGEVRRFNTANDDNVTQVRAFYVNVLNEEQRKRLCENIAGHLKDAQIFIQKKAVKNFTEVHPNYGSHIQALLDKYNAEKPKNAIHTFVQSGSHLAAREKANL

SEQ ID NO: 167 - protein, 524 aa, Artificial Sequence
  Artificial mutant polypeptide
  MUTAGEN (495)..(495)
ADSRDPASDQMQHWKEQRAAQKADVLTTGAGNPVGDKLNVITVGPRGPLLVQDVVFTDEAHFDRERIPERVVHAKGAGAFGYFEVTHDITKYSKAKVFEHIGKKTPIAVRFSTVAGESGSADTVRDPRGFAVKFYTEDGNWDLVGNNTPIFFIRDPILFPSFIHSQKRNPQTHLKDPDVWDFWSLRPESLHQVSFLFSDRGIPDGHRHMNGYGSHTFKLVNANGEAVYCKFHYKTDQGIKNLSVEDAARLSQEDPDYGIRDLFNAIATGKYPSWTFYIQVMTFNQAETFPFNPFDLTKVWPHKDYPLIPVGKLVLNRNPVNYFAEVEQIAFDPSNMPPGIEASPDKMLQGRLFAYPDTHRHRLGPNYLHIPVNCPYRARVANYQRDGPMCMQDNQGGAPNYYPNSFGAPEQQPSALEHSIQYSGEVRRFNTANDDNVTQVRAFYVNVLNEEQRKRLCENIAGHLKDAQIFIQKKAVKNFTEVHPDYGSHIQALLNKYNAEKPKNAIHTFVQSGSHLAAREKANL

SEQ ID NO: 168 - protein, 524 aa, Artificial Sequence
  Artificial mutant polypeptide
  MUTAGEN (32)..(32)
ADSRDPASDQMQHWKEQRAAQKADVLTTGAGDPVGDKLNVITVGPRGPLLVQDVVFTDEAHFDRERIPERVVHAKGAGAFGYFEVTHDITKYSKAKVFEHIGKKTPIAVRFSTVAGESGSADTVRDPRGFAVKFYTEDGNWDLVGNNTPIFFIRDPILFPSFIHSQKRNPQTHLKDPDVWDFWSLRPESLHQVSFLFSDRGIPDGHRHMNGYGSHTFKLVNANGEAVYCKFHYKTDQGIKNLSVEDAARLSQEDPDYGIRDLFNAIATGKYPSWTFYIQVMTFNQAETFPFNPFDLTKVWPHKDYPLIPVGKLVLNRNPVNYFAEVEQIAFDPSNMPPGIEASPDKMLQGRLFAYPDTHRHRLGPNYLHIPVNCPYRARVANYQRDGPMCMQDNQGGAPNYYPNSFGAPEQQPSALEHSIQYSGEVRRFNTANDDNVTQVRAFYVNVLNEEQRKRLCENIAGHLKDAQIFIQKKAVKNFTEVHPDYGSHIQALLDKYNAEKPKNAIHTFVQSGSHLAAREKANL

SEQ ID NO: 169 - protein, 524 aa, Artificial Sequence
  Artificial mutant polypeptide
  MUTAGEN (39)..(39)
ADSRDPASDQMQHWKEQRAAQKADVLTTGAGNPVGDKLDVITVGPRGPLLVQDVVFTDEAHFDRERIPERVVHAKGAGAFGYFEVTHDITKYSKAKVFEHIGKKTPIAVRFSTVAGESGSADTVRDPRGFAVKFYTEDGNWDLVGNNTPIFFIRDPILFPSFIHSQKRNPQTHLKDPDVWDFWSLRPESLHQVSFLFSDRGIPDGHRHMNGYGSHTFKLVNANGEAVYCKFHYKTDQGIKNLSVEDAARLSQEDPDYGIRDLFNAIATGKYPSWTFYIQVMTFNQAETFPFNPFDLTKVWPHKDYPLIPVGKLVLNRNPVNYFAEVEQIAFDPSNMPPGIEASPDKMLQGRLFAYPDTHRHRLGPNYLHIPVNCPYRARVANYQRDGPMCMQDNQGGAPNYYPNSFGAPEQQPSALEHSIQYSGEVRRFNTANDDNVTQVRAFYVNVLNEEQRKRLCENIAGHLKDAQIFIQKKAVKNFTEVHPDYGSHIQALLDKYNAEKPKNAIHTFVQSGSHLAAREKANL

SEQ ID NO: 170 - protein, 524 aa, Artificial Sequence
  Artificial mutant polypeptide
  MUTAGEN (140)..(140)
ADSRDPASDQMQHWKEQRAAQKADVLTTGAGNPVGDKLNVITVGPRGPLLVQDVVFTDEAHFDRERIPERVVHAKGAGAFGYFEVTHDITKYSKAKVFEHIGKKTPIAVRFSTVAGESGSADTVRDPRGFAVKFYTEDGDWDLVGNNTPIFFIRDPILFPSFIHSQKRNPQTHLKDPDVWDFWSLRPESLHQVSFLFSDRGIPDGHRHMNGYGSHTFKLVNANGEAVYCKFHYKTDQGIKNLSVEDAARLSQEDPDYGIRDLFNAIATGKYPSWTFYIQVMTFNQAETFPFNPFDLTKVWPHKDYPLIPVGKLVLNRNPVNYFAEVEQIAFDPSNMPPGIEASPDKMLQGRLFAYPDTHRHRLGPNYLHIPVNCPYRARVANYQRDGPMCMQDNQGGAPNYYPNSFGAPEQQPSALEHSIQYSGEVRRFNTANDDNVTQVRAFYVNVLNEEQRKRLCENIAGHLKDAQIFIQKKAVKNFTEVHPDYGSHIQALLDKYNAEKPKNAIHTFVQSGSHLAAREKANL

SEQ ID NO: 171 - protein, 524 aa, Artificial Sequence
  Artificial mutant polypeptide
  MUTAGEN (146)..(146)
ADSRDPASDQMQHWKEQRAAQKADVLTTGAGNPVGDKLNVITVGPRGPLLVQDVVFTDEAHFDRERIPERVVHAKGAGAFGYFEVTHDITKYSKAKVFEHIGKKTPIAVRFSTVAGESGSADTVRDPRGFAVKFYTEDGNWDLVGDNTPIFFIRDPILFPSFIHSQKRNPQTHLKDPDVWDFWSLRPESLHQVSFLFSDRGIPDGHRHMNGYGSHTFKLVNANGEAVYCKFHYKTDQGIKNLSVEDAARLSQEDPDYGIRDLFNAIATGKYPSWTFYIQVMTFNQAETFPFNPFDLTKVWPHKDYPLIPVGKLVLNRNPVNYFAEVEQIAFDPSNMPPGIEASPDKMLQGRLFAYPDTHRHRLGPNYLHIPVNCPYRARVANYQRDGPMCMQDNQGGAPNYYPNSFGAPEQQPSALEHSIQYSGEVRRFNTANDDNVTQVRAFYVNVLNEEQRKRLCENIAGHLKDAQIFIQKKAVKNFTEVHPDYGSHIQALLDKYNAEKPKNAIHTFVQSGSHLAAREKANL

SEQ ID NO: 172 - protein, 524 aa, Artificial Sequence
  Artificial mutant polypeptide
  MUTAGEN (147)..(147)
ADSRDPASDQMQHWKEQRAAQKADVLTTGAGNPVGDKLNVITVGPRGPLLVQDVVFTDEAHFDRERIPERVVHAKGAGAFGYFEVTHDITKYSKAKVFEHIGKKTPIAVRFSTVAGESGSADTVRDPRGFAVKFYTEDGNWDLVGNDTPIFFIRDPILFPSFIHSQKRNPQTHLKDPDVWDFWSLRPESLHQVSFLFSDRGIPDGHRHMNGYGSHTFKLVNANGEAVYCKFHYKTDQGIKNLSVEDAARLSQEDPDYGIRDLFNAIATGKYPSWTFYIQVMTFNQAETFPFNPFDLTKVWPHKDYPLIPVGKLVLNRNPVNYFAEVEQIAFDPSNMPPGIEASPDKMLQGRLFAYPDTHRHRLGPNYLHIPVNCPYRARVANYQRDGPMCMQDNQGGAPNYYPNSFGAPEQQPSALEHSIQYSGEVRRFNTANDDNVTQVRAFYVNVLNEEQRKRLCENIAGHLKDAQIFIQKKAVKNFTEVHPDYGSHIQALLDKYNAEKPKNAIHTFVQSGSHLAAREKANL

SEQ ID NO: 173 - protein, 524 aa, Artificial Sequence
  Artificial mutant polypeptide
  MUTAGEN (169)..(169)
ADSRDPASDQMQHWKEQRAAQKADVLTTGAGNPVGDKLNVITVGPRGPLLVQDVVFTDEAHFDRERIPERVVHAKGAGAFGYFEVTHDITKYSKAKVFEHIGKKTPIAVRFSTVAGESGSADTVRDPRGFAVKFYTEDGNWDLVGNNTPIFFIRDPILFPSFIHSQKRDPQTHLKDPDVWDFWSLRPESLHQVSFLFSDRGIPDGHRHMNGYGSHTFKLVNANGEAVYCKFHYKTDQGIKNLSVEDAARLSQEDPDYGIRDLFNAIATGKYPSWTFYIQVMTFNQAETFPFNPFDLTKVWPHKDYPLIPVGKLVLNRNPVNYFAEVEQIAFDPSNMPPGIEASPDKMLQGRLFAYPDTHRHRLGPNYLHIPVNCPYRARVANYQRDGPMCMQDNQGGAPNYYPNSFGAPEQQPSALEHSIQYSGEVRRFNTANDDNVTQVRAFYVNVLNEEQRKRLCENIAGHLKDAQIFIQKKAVKNFTEVHPDYGSHIQALLDKYNAEKPKNAIHTFVQSGSHLAAREKANL

SEQ ID NO: 174 - protein, 524 aa, Artificial Sequence
  Artificial mutant polypeptide
  MUTAGEN (210)..(210)
ADSRDPASDQMQHWKEQRAAQKADVLTTGAGNPVGDKLNVITVGPRGPLLVQDVVFTDEAHFDRERIPERVVHAKGAGAFGYFEVTHDITKYSKAKVFEHIGKKTPIAVRFSTVAGESGSADTVRDPRGFAVKFYTEDGNWDLVGNNTPIFFIRDPILFPSFIHSQKRNPQTHLKDPDVWDFWSLRPESLHQVSFLFSDRGIPDGHRHMDGYGSHTFKLVNANGEAVYCKFHYKTDQGIKNLSVEDAARLSQEDPDYGIRDLFNAIATGKYPSWTFYIQVMTFNQAETFPFNPFDLTKVWPHKDYPLIPVGKLVLNRNPVNYFAEVEQIAFDPSNMPPGIEASPDKMLQGRLFAYPDTHRHRLGPNYLHIPVNCPYRARVANYQRDGPMCMQDNQGGAPNYYPNSFGAPEQQPSALEHSIQYSGEVRRFNTANDDNVTQVRAFYVNVLNEEQRKRLCENIAGHLKDAQIFIQKKAVKNFTEVHPDYGSHIQALLDKYNAEKPKNAIHTFVQSGSHLAAREKANL

SEQ ID NO: 175 - protein, 524 aa, Artificial Sequence
  Artificial mutant polypeptide
  MUTAGEN (221)..(221)
ADSRDPASDQMQHWKEQRAAQKADVLTTGAGNPVGDKLNVITVGPRGPLLVQDVVFTDEAHFDRERIPERVVHAKGAGAFGYFEVTHDITKYSKAKVFEHIGKKTPIAVRFSTVAGESGSADTVRDPRGFAVKFYTEDGNWDLVGNNTPIFFIRDPILFPSFIHSQKRNPQTHLKDPDVWDFWSLRPESLHQVSFLFSDRGIPDGHRHMNGYGSHTFKLVDANGEAVYCKFHYKTDQGIKNLSVEDAARLSQEDPDYGIRDLFNAIATGKYPSWTFYIQVMTFNQAETFPFNPFDLTKVWPHKDYPLIPVGKLVLNRNPVNYFAEVEQIAFDPSNMPPGIEASPDKMLQGRLFAYPDTHRHRLGPNYLHIPVNCPYRARVANYQRDGPMCMQDNQGGAPNYYPNSFGAPEQQPSALEHSIQYSGEVRRFNTANDDNVTQVRAFYVNVLNEEQRKRLCENIAGHLKDAQIFIQKKAVKNFTEVHPDYGSHIQALLDKYNAEKPKNAIHTFVQSGSHLAAREKANL

SEQ ID NO: 176 - protein, 524 aa, Artificial Sequence
  Artificial mutant polypeptide
  MUTAGEN (223)..(223)
ADSRDPASDQMQHWKEQRAAQKADVLTTGAGNPVGDKLNVITVGPRGPLLVQDVVFTDEAHFDRERIPERVVHAKGAGAFGYFEVTHDITKYSKAKVFEHIGKKTPIAVRFSTVAGESGSADTVRDPRGFAVKFYTEDGNWDLVGNNTPIFFIRDPILFPSFIHSQKRNPQTHLKDPDVWDFWSLRPESLHQVSFLFSDRGIPDGHRHMNGYGSHTFKLVNADGEAVYCKFHYKTDQGIKNLSVEDAARLSQEDPDYGIRDLFNAIATGKYPSWTFYIQVMTFNQAETFPFNPFDLTKVWPHKDYPLIPVGKLVLNRNPVNYFAEVEQIAFDPSNMPPGIEASPDKMLQGRLFAYPDTHRHRLGPNYLHIPVNCPYRARVANYQRDGPMCMQDNQGGAPNYYPNSFGAPEQQPSALEHSIQYSGEVRRFNTANDDNVTQVRAFYVNVLNEEQRKRLCENIAGHLKDAQIFIQKKAVKNFTEVHPDYGSHIQALLDKYNAEKPKNAIHTFVQSGSHLAAREKANL

SEQ ID NO: 177 - protein, 524 aa, Artificial Sequence
  Artificial mutant polypeptide
  MUTAGEN (241)..(241)
ADSRDPASDQMQHWKEQRAAQKADVLTTGAGNPVGDKLNVITVGPRGPLLVQDVVFTDEAHFDRERIPERVVHAKGAGAFGYFEVTHDITKYSKAKVFEHIGKKTPIAVRFSTVAGESGSADTVRDPRGFAVKFYTEDGNWDLVGNNTPIFFIRDPILFPSFIHSQKRNPQTHLKDPDVWDFWSLRPESLHQVSFLFSDRGIPDGHRHMNGYGSHTFKLVNANGEAVYCKFHYKTDQGIKDLSVEDAARLSQEDPDYGIRDLFNAIATGKYPSWTFYIQVMTFNQAETFPFNPFDLTKVWPHKDYPLIPVGKLVLNRNPVNYFAEVEQIAFDPSNMPPGIEASPDKMLQGRLFAYPDTHRHRLGPNYLHIPVNCPYRARVANYQRDGPMCMQDNQGGAPNYYPNSFGAPEQQPSALEHSIQYSGEVRRFNTANDDNVTQVRAFYVNVLNEEQRKRLCENIAGHLKDAQIFIQKKAVKNFTEVHPDYGSHIQALLDKYNAEKPKNAIHTFVQSGSHLAAREKANL

SEQ ID NO: 178 - protein, 524 aa, Artificial Sequence
  Artificial mutant polypeptide
  MUTAGEN (264)..(264)
ADSRDPASDQMQHWKEQRAAQKADVLTTGAGNPVGDKLNVITVGPRGPLLVQDVVFTDEAHFDRERIPERVVHAKGAGAFGYFEVTHDITKYSKAKVFEHIGKKTPIAVRFSTVAGESGSADTVRDPRGFAVKFYTEDGNWDLVGNNTPIFFIRDPILFPSFIHSQKRNPQTHLKDPDVWDFWSLRPESLHQVSFLFSDRGIPDGHRHMNGYGSHTFKLVNANGEAVYCKFHYKTDQGIKNLSVEDAARLSQEDPDYGIRDLFDAIATGKYPSWTFYIQVMTFNQAETFPFNPFDLTKVWPHKDYPLIPVGKLVLNRNPVNYFAEVEQIAFDPSNMPPGIEASPDKMLQGRLFAYPDTHRHRLGPNYLHIPVNCPYRARVANYQRDGPMCMQDNQGGAPNYYPNSFGAPEQQPSALEHSIQYSGEVRRFNTANDDNVTQVRAFYVNVLNEEQRKRLCENIAGHLKDAQIFIQKKAVKNFTEVHPDYGSHIQALLDKYNAEKPKNAIHTFVQSGSHLAAREKANL

SEQ ID NO: 179 - protein, 524 aa, Artificial Sequence
  Artificial mutant polypeptide
  MUTAGEN (284)..(284)
ADSRDPASDQMQHWKEQRAAQKADVLTTGAGNPVGDKLNVITVGPRGPLLVQDVVFTDEAHFDRERIPERVVHAKGAGAFGYFEVTHDITKYSKAKVFEHIGKKTPIAVRFSTVAGESGSADTVRDPRGFAVKFYTEDGNWDLVGNNTPIFFIRDPILFPSFIHSQKRNPQTHLKDPDVWDFWSLRPESLHQVSFLFSDRGIPDGHRHMNGYGSHTFKLVNANGEAVYCKFHYKTDQGIKNLSVEDAARLSQEDPDYGIRDLFNAIATGKYPSWTFYIQVMTFDQAETFPFNPFDLTKVWPHKDYPLIPVGKLVLNRNPVNYFAEVEQIAFDPSNMPPGIEASPDKMLQGRLFAYPDTHRHRLGPNYLHIPVNCPYRARVANYQRDGPMCMQDNQGGAPNYYPNSFGAPEQQPSALEHSIQYSGEVRRFNTANDDNVTQVRAFYVNVLNEEQRKRLCENIAGHLKDAQIFIQKKAVKNFTEVHPDYGSHIQALLDKYNAEKPKNAIHTFVQSGSHLAAREKANL

SEQ ID NO: 180 - protein, 524 aa, Artificial Sequence
  Artificial mutant polypeptide
  MUTAGEN (292)..(292)
ADSRDPASDQMQHWKEQRAAQKADVLTTGAGNPVGDKLNVITVGPRGPLLVQDVVFTDEAHFDRERIPERVVHAKGAGAFGYFEVTHDITKYSKAKVFEHIGKKTPIAVRFSTVAGESGSADTVRDPRGFAVKFYTEDGNWDLVGNNTPIFFIRDPILFPSFIHSQKRNPQTHLKDPDVWDFWSLRPESLHQVSFLFSDRGIPDGHRHMNGYGSHTFKLVNANGEAVYCKFHYKTDQGIKNLSVEDAARLSQEDPDYGIRDLFNAIATGKYPSWTFYIQVMTFNQAETFPFDPFDLTKVWPHKDYPLIPVGKLVLNRNPVNYFAEVEQIAFDPSNMPPGIEASPDKMLQGRLFAYPDTHRHRLGPNYLHIPVNCPYRARVANYQRDGPMCMQDNQGGAPNYYPNSFGAPEQQPSALEHSIQYSGEVRRFNTANDDNVTQVRAFYVNVLNEEQRKRLCENIAGHLKDAQIFIQKKAVKNFTEVHPDYGSHIQALLDKYNAEKPKNAIHTFVQSGSHLAAREKANL

SEQ ID NO: 181 - protein, 524 aa, Artificial Sequence
  Artificial mutant polypeptide
  MUTAGEN (316)..(316)
ADSRDPASDQMQHWKEQRAAQKADVLTTGAGNPVGDKLNVITVGPRGPLLVQDVVFTDEAHFDRERIPERVVHAKGAGAFGYFEVTHDITKYSKAKVFEHIGKKTPIAVRFSTVAGESGSADTVRDPRGFAVKFYTEDGNWDLVGNNTPIFFIRDPILFPSFIHSQKRNPQTHLKDPDVWDFWSLRPESLHQVSFLFSDRGIPDGHRHMNGYGSHTFKLVNANGEAVYCKFHYKTDQGIKNLSVEDAARLSQEDPDYGIRDLFNAIATGKYPSWTFYIQVMTFNQAETFPFNPFDLTKVWPHKDYPLIPVGKLVLDRNPVNYFAEVEQIAFDPSNMPPGIEASPDKMLQGRLFAYPDTHRHRLGPNYLHIPVNCPYRARVANYQRDGPMCMQDNQGGAPNYYPNSFGAPEQQPSALEHSIQYSGEVRRFNTANDDNVTQVRAFYVNVLNEEQRKRLCENIAGHLKDAQIFIQKKAVKNFTEVHPDYGSHIQALLDKYNAEKPKNAIHTFVQSGSHLAAREKANL

SEQ ID NO: 182 - protein, 524 aa, Artificial Sequence
  Artificial mutant polypeptide
  MUTAGEN (318)..(318)
ADSRDPASDQMQHWKEQRAAQKADVLTTGAGNPVGDKLNVITVGPRGPLLVQDVVFTDEAHFDRERIPERVVHAKGAGAFGYFEVTHDITKYSKAKVFEHIGKKTPIAVRFSTVAGESGSADTVRDPRGFAVKFYTEDGNWDLVGNNTPIFFIRDPILFPSFIHSQKRNPQTHLKDPDVWDFWSLRPESLHQVSFLFSDRGIPDGHRHMNGYGSHTFKLVNANGEAVYCKFHYKTDQGIKNLSVEDAARLSQEDPDYGIRDLFNAIATGKYPSWTFYIQVMTFNQAETFPFNPFDLTKVWPHKDYPLIPVGKLVLNRDPVNYFAEVEQIAFDPSNMPPGIEASPDKMLQGRLFAYPDTHRHRLGPNYLHIPVNCPYRARVANYQRDGPMCMQDNQGGAPNYYPNSFGAPEQQPSALEHSIQYSGEVRRFNTANDDNVTQVRAFYVNVLNEEQRKRLCENIAGHLKDAQIFIQKKAVKNFTEVHPDYGSHIQALLDKYNAEKPKNAIHTFVQSGSHLAAREKANL

SEQ ID NO: 183 - protein, 524 aa, Artificial Sequence
  Artificial mutant polypeptide
  MUTAGEN (321)..(321)
ADSRDPASDQMQHWKEQRAAQKADVLTTGAGNPVGDKLNVITVGPRGPLLVQDVVFTDEAHFDRERIPERVVHAKGAGAFGYFEVTHDITKYSKAKVFEHIGKKTPIAVRFSTVAGESGSADTVRDPRGFAVKFYTEDGNWDLVGNNTPIFFIRDPILFPSFIHSQKRNPQTHLKDPDVWDFWSLRPESLHQVSFLFSDRGIPDGHRHMNGYGSHTFKLVNANGEAVYCKFHYKTDQGIKNLSVEDAARLSQEDPDYGIRDLFNAIATGKYPSWTFYIQVMTFNQAETFPFNPFDLTKVWPHKDYPLIPVGKLVLNRNPVDYFAEVEQIAFDPSNMPPGIEASPDKMLQGRLFAYPDTHRHRLGPNYLHIPVNCPYRARVANYQRDGPMCMQDNQGGAPNYYPNSFGAPEQQPSALEHSIQYSGEVRRFNTANDDNVTQVRAFYVNVLNEEQRKRLCENIAGHLKDAQIFIQKKAVKNFTEVHPDYGSHIQALLDKYNAEKPKNAIHTFVQSGSHLAAREKANL

SEQ ID NO: 184 - protein, 524 aa, Artificial Sequence
  Artificial mutant polypeptide
  MUTAGEN (335)..(335)
ADSRDPASDQMQHWKEQRAAQKADVLTTGAGNPVGDKLNVITVGPRGPLLVQDVVFTDEAHFDRERIPERVVHAKGAGAFGYFEVTHDITKYSKAKVFEHIGKKTPIAVRFSTVAGESGSADTVRDPRGFAVKFYTEDGNWDLVGNNTPIFFIRDPILFPSFIHSQKRNPQTHLKDPDVWDFWSLRPESLHQVSFLFSDRGIPDGHRHMNGYGSHTFKLVNANGEAVYCKFHYKTDQGIKNLSVEDAARLSQEDPDYGIRDLFNAIATGKYPSWTFYIQVMTFNQAETFPFNPFDLTKVWPHKDYPLIPVGKLVLNRNPVNYFAEVEQIAFDPSDMPPGIEASPDKMLQGRLFAYPDTHRHRLGPNYLHIPVNCPYRARVANYQRDGPMCMQDNQGGAPNYYPNSFGAPEQQPSALEHSIQYSGEVRRFNTANDDNVTQVRAFYVNVLNEEQRKRLCENIAGHLKDAQIFIQKKAVKNFTEVHPDYGSHIQALLDKYNAEKPKNAIHTFVQSGSHLAAREKANL

SEQ ID NO: 185 - protein, 524 aa, Artificial Sequence
  Artificial mutant polypeptide
  MUTAGEN (366)..(366)
ADSRDPASDQMQHWKEQRAAQKADVLTTGAGNPVGDKLNVITVGPRGPLLVQDVVFTDEAHFDRERIPERVVHAKGAGAFGYFEVTHDITKYSKAKVFEHIGKKTPIAVRFSTVAGESGSADTVRDPRGFAVKFYTEDGNWDLVGNNTPIFFIRDPILFPSFIHSQKRNPQTHLKDPDVWDFWSLRPESLHQVSFLFSDRGIPDGHRHMNGYGSHTFKLVNANGEAVYCKFHYKTDQGIKNLSVEDAARLSQEDPDYGIRDLFNAIATGKYPSWTFYIQVMTFNQAETFPFNPFDLTKVWPHKDYPLIPVGKLVLNRNPVNYFAEVEQIAFDPSNMPPGIEASPDKMLQGRLFAYPDTHRHRLGPDYLHIPVNCPYRARVANYQRDGPMCMQDNQGGAPNYYPNSFGAPEQQPSALEHSIQYSGEVRRFNTANDDNVTQVRAFYVNVLNEEQRKRLCENIAGHLKDAQIFIQKKAVKNFTEVHPDYGSHIQALLDKYNAEKPKNAIHTFVQSGSHLAAREKANL

SEQ ID NO: 186 - protein, 524 aa, Artificial Sequence
  Artificial mutant polypeptide
  MUTAGEN (373)..(373)
ADSRDPASDQMQHWKEQRAAQKADVLTTGAGNPVGDKLNVITVGPRGPLLVQDVVFTDEAHFDRERIPERVVHAKGAGAFGYFEVTHDITKYSKAKVFEHIGKKTPIAVRFSTVAGESGSADTVRDPRGFAVKFYTEDGNWDLVGNNTPIFFIRDPILFPSFIHSQKRNPQTHLKDPDVWDFWSLRPESLHQVSFLFSDRGIPDGHRHMNGYGSHTFKLVNANGEAVYCKFHYKTDQGIKNLSVEDAARLSQEDPDYGIRDLFNAIATGKYPSWTFYIQVMTFNQAETFPFNPFDLTKVWPHKDYPLIPVGKLVLNRNPVNYFAEVEQIAFDPSNMPPGIEASPDKMLQGRLFAYPDTHRHRLGPNYLHIPVDCPYRARVANYQRDGPMCMQDNQGGAPNYYPNSFGAPEQQPSALEHSIQYSGEVRRFNTANDDNVTQVRAFYVNVLNEEQRKRLCENIAGHLKDAQIFIQKKAVKNFTEVHPDYGSHIQALLDKYNAEKPKNAIHTFVQSGSHLAAREKANL

SEQ ID NO: 187 - protein, 524 aa, Artificial Sequence
  Artificial mutant polypeptide
  MUTAGEN (382)..(382)
ADSRDPASDQMQHWKEQRAAQKADVLTTGAGNPVGDKLNVITVGPRGPLLVQDVVFTDEAHFDRERIPERVVHAKGAGAFGYFEVTHDITKYSKAKVFEHIGKKTPIAVRFSTVAGESGSADTVRDPRGFAVKFYTEDGNWDLVGNNTPIFFIRDPILFPSFIHSQKRNPQTHLKDPDVWDFWSLRPESLHQVSFLFSDRGIPDGHRHMNGYGSHTFKLVNANGEAVYCKFHYKTDQGIKNLSVEDAARLSQEDPDYGIRDLFNAIATGKYPSWTFYIQVMTFNQAETFPFNPFDLTKVWPHKDYPLIPVGKLVLNRNPVNYFAEVEQIAFDPSNMPPGIEASPDKMLQGRLFAYPDTHRHRLGPNYLHIPVNCPYRARVADYQRDGPMCMQDNQGGAPNYYPNSFGAPEQQPSALEHSIQYSGEVRRFNTANDDNVTQVRAFYVNVLNEEQRKRLCENIAGHLKDAQIFIQKKAVKNFTEVHPDYGSHIQALLDKYNAEKPKNAIHTFVQSGSHLAAREKANL

SEQ ID NO: 188 - protein, 524 aa, Artificial Sequence
  Artificial mutant polypeptide
  MUTAGEN (394)..(394)
ADSRDPASDQMQHWKEQRAAQKADVLTTGAGNPVGDKLNVITVGPRGPLLVQDVVFTDEAHFDRERIPERVVHAKGAGAFGYFEVTHDITKYSKAKVFEHIGKKTPIAVRFSTVAGESGSADTVRDPRGFAVKFYTEDGNWDLVGNNTPIFFIRDPILFPSFIHSQKRNPQTHLKDPDVWDFWSLRPESLHQVSFLFSDRGIPDGHRHMNGYGSHTFKLVNANGEAVYCKFHYKTDQGIKNLSVEDAARLSQEDPDYGIRDLFNAIATGKYPSWTFYIQVMTFNQAETFPFNPFDLTKVWPHKDYPLIPVGKLVLNRNPVNYFAEVEQIAFDPSNMPPGIEASPDKMLQGRLFAYPDTHRHRLGPNYLHIPVNCPYRARVANYQRDGPMCMQDDQGGAPNYYPNSFGAPEQQPSALEHSIQYSGEVRRFNTANDDNVTQVRAFYVNVLNEEQRKRLCENIAGHLKDAQIFIQKKAVKNFTEVHPDYGSHIQALLDKYNAEKPKNAIHTFVQSGSHLAAREKANL

SEQ ID NO: 189 - protein, 524 aa, Artificial Sequence
  Artificial mutant polypeptide
  MUTAGEN (400)..(400)
ADSRDPASDQMQHWKEQRAAQKADVLTTGAGNPVGDKLNVITVGPRGPLLVQDVVFTDEAHFDRERIPERVVHAKGAGAFGYFEVTHDITKYSKAKVFEHIGKKTPIAVRFSTVAGESGSADTVRDPRGFAVKFYTEDGNWDLVGNNTPIFFIRDPILFPSFIHSQKRNPQTHLKDPDVWDFWSLRPESLHQVSFLFSDRGIPDGHRHMNGYGSHTFKLVNANGEAVYCKFHYKTDQGIKNLSVEDAARLSQEDPDYGIRDLFNAIATGKYPSWTFYIQVMTFNQAETFPFNPFDLTKVWPHKDYPLIPVGKLVLNRNPVNYFAEVEQIAFDPSNMPPGIEASPDKMLQGRLFAYPDTHRHRLGPNYLHIPVNCPYRARVANYQRDGPMCMQDNQGGAPDYYPNSFGAPEQQPSALEHSIQYSGEVRRFNTANDDNVTQVRAFYVNVLNEEQRKRLCENIAGHLKDAQIFIQKKAVKNFTEVHPDYGSHIQALLDKYNAEKPKNAIHTFVQSGSHLAAREKANL

SEQ ID NO: 190 - protein, 524 aa, Artificial Sequence
  Artificial mutant polypeptide
  MUTAGEN (404)..(404)
ADSRDPASDQMQHWKEQRAAQKADVLTTGAGNPVGDKLNVITVGPRGPLLVQDVVFTDEAHFDRERIPERVVHAKGAGAFGYFEVTHDITKYSKAKVFEHIGKKTPIAVRFSTVAGESGSADTVRDPRGFAVKFYTEDGNWDLVGNNTPIFFIRDPILFPSFIHSQKRNPQTHLKDPDVWDFWSLRPESLHQVSFLFSDRGIPDGHRHMNGYGSHTFKLVNANGEAVYCKFHYKTDQGIKNLSVEDAARLSQEDPDYGIRDLFNAIATGKYPSWTFYIQVMTFNQAETFPFNPFDLTKVWPHKDYPLIPVGKLVLNRNPVNYFAEVEQIAFDPSNMPPGIEASPDKMLQGRLFAYPDTHRHRLGPNYLHIPVNCPYRARVANYQRDGPMCMQDNQGGAPNYYPDSFGAPEQQPSALEHSIQYSGEVRRFNTANDDNVTQVRAFYVNVLNEEQRKRLCENIAGHLKDAQIFIQKKAVKNFTEVHPDYGSHIQALLDKYNAEKPKNAIHTFVQSGSHLAAREKANL

SEQ ID NO: 191 - protein, 524 aa, Artificial Sequence
  Artificial mutant polypeptide
  MUTAGEN (430)..(430)
ADSRDPASDQMQHWKEQRAAQKADVLTTGAGNPVGDKLNVITVGPRGPLLVQDVVFTDEAHFDRERIPERVVHAKGAGAFGYFEVTHDITKYSKAKVFEHIGKKTPIAVRFSTVAGESGSADTVRDPRGFAVKFYTEDGNWDLVGNNTPIFFIRDPILFPSFIHSQKRNPQTHLKDPDVWDFWSLRPESLHQVSFLFSDRGIPDGHRHMNGYGSHTFKLVNANGEAVYCKFHYKTDQGIKNLSVEDAARLSQEDPDYGIRDLFNAIATGKYPSWTFYIQVMTFNQAETFPFNPFDLTKVWPHKDYPLIPVGKLVLNRNPVNYFAEVEQIAFDPSNMPPGIEASPDKMLQGRLFAYPDTHRHRLGPNYLHIPVNCPYRARVANYQRDGPMCMQDNQGGAPNYYPNSFGAPEQQPSALEHSIQYSGEVRRFDTANDDNVTQVRAFYVNVLNEEQRKRLCENIAGHLKDAQIFIQKKAVKNFTEVHPDYGSHIQALLDKYNAEKPKNAIHTFVQSGSHLAAREKANL

SEQ ID NO: 192 - protein, 524 aa, Artificial Sequence
  Artificial mutant polypeptide
  MUTAGEN (433)..(433)
ADSRDPASDQMQHWKEQRAAQKADVLTTGAGNPVGDKLNVITVGPRGPLLVQDVVFTDEAHFDRERIPERVVHAKGAGAFGYFEVTHDITKYSKAKVFEHIGKKTPIAVRFSTVAGESGSADTVRDPRGFAVKFYTEDGNWDLVGNNTPIFFIRDPILFPSFIHSQKRNPQTHLKDPDVWDFWSLRPESLHQVSFLFSDRGIPDGHRHMNGYGSHTFKLVNANGEAVYCKFHYKTDQGIKNLSVEDAARLSQEDPDYGIRDLFNAIATGKYPSWTFYIQVMTFNQAETFPFNPFDLTKVWPHKDYPLIPVGKLVLNRNPVNYFAEVEQIAFDPSNMPPGIEASPDKMLQGRLFAYPDTHRHRLGPNYLHIPVNCPYRARVANYQRDGPMCMQDNQGGAPNYYPNSFGAPEQQPSALEHSIQYSGEVRRFNTADDDNVTQVRAFYVNVLNEEQRKRLCENIAGHLKDAQIFIQKKAVKNFTEVHPDYGSHIQALLDKYNAEKPKNAIHTFVQSGSHLAAREKANL

SEQ ID NO: 193 - protein, 524 aa, Artificial Sequence
  Artificial mutant polypeptide
  MUTAGEN (436)..(436)
ADSRDPASDQMQHWKEQRAAQKADVLTTGAGNPVGDKLNVITVGPRGPLLVQDVVFTDEAHFDRERIPERVVHAKGAGAFGYFEVTHDITKYSKAKVFEHIGKKTPIAVRFSTVAGESGSADTVRDPRGFAVKFYTEDGNWDLVGNNTPIFFIRDPILFPSFIHSQKRNPQTHLKDPDVWDFWSLRPESLHQVSFLFSDRGIPDGHRHMNGYGSHTFKLVNANGEAVYCKFHYKTDQGIKNLSVEDAARLSQEDPDYGIRDLFNAIATGKYPSWTFYIQVMTFNQAETFPFNPFDLTKVWPHKDYPLIPVGKLVLNRNPVNYFAEVEQIAFDPSNMPPGIEASPDKMLQGRLFAYPDTHRHRLGPNYLHIPVNCPYRARVANYQRDGPMCMQDNQGGAPNYYPNSFGAPEQQPSALEHSIQYSGEVRRFNTANDDDVTQVRAFYVNVLNEEQRKRLCENIAGHLKDAQIFIQKKAVKNFTEVHPDYGSHIQALLDKYNAEKPKNAIHTFVQSGSHLAAREKANL

SEQ ID NO: 194 - protein, 524 aa, Artificial Sequence
  Artificial mutant polypeptide
  MUTAGEN (446)..(446)
ADSRDPASDQMQHWKEQRAAQKADVLTTGAGNPVGDKLNVITVGPRGPLLVQDVVFTDEAHFDRERIPERVVHAKGAGAFGYFEVTHDITKYSKAKVFEHIGKKTPIAVRFSTVAGESGSADTVRDPRGFAVKFYTEDGNWDLVGNNTPIFFIRDPILFPSFIHSQKRNPQTHLKDPDVWDFWSLRPESLHQVSFLFSDRGIPDGHRHMNGYGSHTFKLVNANGEAVYCKFHYKTDQGIKNLSVEDAARLSQEDPDYGIRDLFNAIATGKYPSWTFYIQVMTFNQAETFPFNPFDLTKVWPHKDYPLIPVGKLVLNRNPVNYFAEVEQIAFDPSNMPPGIEASPDKMLQGRLFAYPDTHRHRLGPNYLHIPVNCPYRARVANYQRDGPMCMQDNQGGAPNYYPNSFGAPEQQPSALEHSIQYSGEVRRFNTANDDNVTQVRAFYVDVLNEEQRKRLCENIAGHLKDAQIFIQKKAVKNFTEVHPDYGSHIQALLDKYNAEKPKNAIHTFVQSGSHLAAREKANL

SEQ ID NO: 195 - protein, 524 aa, Artificial Sequence
  Artificial mutant polypeptide
  MUTAGEN (449)..(449)
ADSRDPASDQMQHWKEQRAAQKADVLTTGAGNPVGDKLNVITVGPRGPLLVQDVVFTDEAHFDRERIPERVVHAKGAGAFGYFEVTHDITKYSKAKVFEHIGKKTPIAVRFSTVAGESGSADTVRDPRGFAVKFYTEDGNWDLVGNNTPIFFIRDPILFPSFIHSQKRNPQTHLKDPDVWDFWSLRPESLHQVSFLFSDRGIPDGHRHMNGYGSHTFKLVNANGEAVYCKFHYKTDQGIKNLSVEDAARLSQEDPDYGIRDLFNAIATGKYPSWTFYIQVMTFNQAETFPFNPFDLTKVWPHKDYPLIPVGKLVLNRNPVNYFAEVEQIAFDPSNMPPGIEASPDKMLQGRLFAYPDTHRHRLGPNYLHIPVNCPYRARVANYQRDGPMCMQDNQGGAPNYYPNSFGAPEQQPSALEHSIQYSGEVRRFNTANDDNVTQVRAFYVNVLDEEQRKRLCENIAGHLKDAQIFIQKKAVKNFTEVHPDYGSHIQALLDKYNAEKPKNAIHTFVQSGSHLAAREKANL

SEQ ID NO: 196 - protein, 524 aa, Artificial Sequence
  Artificial mutant polypeptide
  MUTAGEN (459)..(459)
ADSRDPASDQMQHWKEQRAAQKADVLTTGAGNPVGDKLNVITVGPRGPLLVQDVVFTDEAHFDRERIPERVVHAKGAGAFGYFEVTHDITKYSKAKVFEHIGKKTPIAVRFSTVAGESGSADTVRDPRGFAVKFYTEDGNWDLVGNNTPIFFIRDPILFPSFIHSQKRNPQTHLKDPDVWDFWSLRPESLHQVSFLFSDRGIPDGHRHMNGYGSHTFKLVNANGEAVYCKFHYKTDQGIKNLSVEDAARLSQEDPDYGIRDLFNAIATGKYPSWTFYIQVMTFNQAETFPFNPFDLTKVWPHKDYPLIPVGKLVLNRNPVNYFAEVEQIAFDPSNMPPGIEASPDKMLQGRLFAYPDTHRHRLGPNYLHIPVNCPYRARVANYQRDGPMCMQDNQGGAPNYYPNSFGAPEQQPSALEHSIQYSGEVRRFNTANDDNVTQVRAFYVNVLNEEQRKRLCEDIAGHLKDAQIFIQKKAVKNFTEVHPDYGSHIQALLDKYNAEKPKNAIHTFVQSGSHLAAREKANL

SEQ ID NO: 197 - protein, 524 aa, Artificial Sequence
  Artificial mutant polypeptide
  MUTAGEN (478)..(478)
ADSRDPASDQMQHWKEQRAAQKADVLTTGAGNPVGDKLNVITVGPRGPLLVQDVVFTDEAHFDRERIPERVVHAKGAGAFGYFEVTHDITKYSKAKVFEHIGKKTPIAVRFSTVAGESGSADTVRDPRGFAVKFYTEDGNWDLVGNNTPIFFIRDPILFPSFIHSQKRNPQTHLKDPDVWDFWSLRPESLHQVSFLFSDRGIPDGHRHMNGYGSHTFKLVNANGEAVYCKFHYKTDQGIKNLSVEDAARLSQEDPDYGIRDLFNAIATGKYPSWTFYIQVMTFNQAETFPFNPFDLTKVWPHKDYPLIPVGKLVLNRNPVNYFAEVEQIAFDPSNMPPGIEASPDKMLQGRLFAYPDTHRHRLGPNYLHIPVNCPYRARVANYQRDGPMCMQDNQGGAPNYYPNSFGAPEQQPSALEHSIQYSGEVRRFNTANDDNVTQVRAFYVNVLNEEQRKRLCENIAGHLKDAQIFIQKKAVKDFTEVHPDYGSHIQALLDKYNAEKPKNAIHTFVQSGSHLAAREKANL

SEQ ID NO: 198 - protein, 524 aa, Artificial Sequence
  Artificial mutant polypeptide
  MUTAGEN (498)..(498)
ADSRDPASDQMQHWKEQRAAQKADVLTTGAGNPVGDKLNVITVGPRGPLLVQDVVFTDEAHFDRERIPERVVHAKGAGAFGYFEVTHDITKYSKAKVFEHIGKKTPIAVRFSTVAGESGSADTVRDPRGFAVKFYTEDGNWDLVGNNTPIFFIRDPILFPSFIHSQKRNPQTHLKDPDVWDFWSLRPESLHQVSFLFSDRGIPDGHRHMNGYGSHTFKLVNANGEAVYCKFHYKTDQGIKNLSVEDAARLSQEDPDYGIRDLFNAIATGKYPSWTFYIQVMTFNQAETFPFNPFDLTKVWPHKDYPLIPVGKLVLNRNPVNYFAEVEQIAFDPSNMPPGIEASPDKMLQGRLFAYPDTHRHRLGPNYLHIPVNCPYRARVANYQRDGPMCMQDNQGGAPNYYPNSFGAPEQQPSALEHSIQYSGEVRRFNTANDDNVTQVRAFYVNVLNEEQRKRLCENIAGHLKDAQIFIQKKAVKNFTEVHPDYGSHIQALLDKYDAEKPKNAIHTFVQSGSHLAAREKANL

SEQ ID NO: 199 - protein, 524 aa, Artificial Sequence
  Artificial mutant polypeptide
  MUTAGEN (504)..(504)
ADSRDPASDQMQHWKEQRAAQKADVLTTGAGNPVGDKLNVITVGPRGPLLVQDVVFTDEAHFDRERIPERVVHAKGAGAFGYFEVTHDITKYSKAKVFEHIGKKTPIAVRFSTVAGESGSADTVRDPRGFAVKFYTEDGNWDLVGNNTPIFFIRDPILFPSFIHSQKRNPQTHLKDPDVWDFWSLRPESLHQVSFLFSDRGIPDGHRHMNGYGSHTFKLVNANGEAVYCKFHYKTDQGIKNLSVEDAARLSQEDPDYGIRDLFNAIATGKYPSWTFYIQVMTFNQAETFPFNPFDLTKVWPHKDYPLIPVGKLVLNRNPVNYFAEVEQIAFDPSNMPPGIEASPDKMLQGRLFAYPDTHRHRLGPNYLHIPVNCPYRARVANYQRDGPMCMQDNQGGAPNYYPNSFGAPEQQPSALEHSIQYSGEVRRFNTANDDNVTQVRAFYVNVLNEEQRKRLCENIAGHLKDAQIFIQKKAVKNFTEVHPDYGSHIQALLDKYNAEKPKDAIHTFVQSGSHLAAREKANL

SEQ ID NO: 200 - protein, 524 aa, Artificial Sequence
  Artificial mutant polypeptide
  MUTAGEN (523)..(523)
ADSRDPASDQMQHWKEQRAAQKADVLTTGAGNPVGDKLNVITVGPRGPLLVQDVVFTDEAHFDRERIPERVVHAKGAGAFGYFEVTHDITKYSKAKVFEHIGKKTPIAVRFSTVAGESGSADTVRDPRGFAVKFYTEDGNWDLVGNNTPIFFIRDPILFPSFIHSQKRNPQTHLKDPDVWDFWSLRPESLHQVSFLFSDRGIPDGHRHMNGYGSHTFKLVNANGEAVYCKFHYKTDQGIKNLSVEDAARLSQEDPDYGIRDLFNAIATGKYPSWTFYIQVMTFNQAETFPFNPFDLTKVWPHKDYPLIPVGKLVLNRNPVNYFAEVEQIAFDPSNMPPGIEASPDKMLQGRLFAYPDTHRHRLGPNYLHIPVNCPYRARVANYQRDGPMCMQDNQGGAPNYYPNSFGAPEQQPSALEHSIQYSGEVRRFNTANDDNVTQVRAFYVNVLNEEQRKRLCENIAGHLKDAQIFIQKKAVKNFTEVHPDYGSHIQALLDKYNAEKPKNAIHTFVQSGSHLAAREKADL

SEQ ID NO: 201 - protein, 202 aa, Artificial Sequence
  Artificial mutant polypeptide
  MUTAGEN (27)..(27)
  BINDING (48)..(48): Selenium
  SITE (48)..(48): Amino acid at position 48 is selenocysteine (Sec)
CAARLAAAAAAAQSVYAFSARPLAGGQPVSLGSLRGKVLLIENVASLXGTTVRDYTQMNELQRRLGPRGLVVLGFPCNQFGHQENAKNEEILNSLKYVRPGGGFEPNFMLFEKCEVNGAGAHPLFAFLREALPAPSDDATALMTDPKLITWSPVCRNDVAWNFEKFLVGPDGVPLRRYSRRFQTIDIEPDIEALLSQGPSCA

SEQ ID NO: 202 - protein, 202 aa, Artificial Sequence
  Artificial mutant polypeptide
  MUTAGEN (42)..(42)
  BINDING (48)..(48): Selenium
  SITE (48)..(48): Amino acid at position 48 is selenocysteine (Sec)
CAARLAAAAAAAQSVYAFSARPLAGGEPVSLGSLRGKVLLIQNVASLXGTTVRDYTQMNELQRRLGPRGLVVLGFPCNQFGHQENAKNEEILNSLKYVRPGGGFEPNFMLFEKCEVNGAGAHPLFAFLREALPAPSDDATALMTDPKLITWSPVCRNDVAWNFEKFLVGPDGVPLRRYSRRFQTIDIEPDIEALLSQGPSCA

SEQ ID NO: 203 - protein, 202 aa, Artificial Sequence
  Artificial mutant polypeptide
  MUTAGEN (60)..(60)
  BINDING (48)..(48): Selenium
  SITE (48)..(48): Amino acid at position 48 is selenocysteine (Sec)
CAARLAAAAAAAQSVYAFSARPLAGGEPVSLGSLRGKVLLIENVASLXGTTVRDYTQMNQLQRRLGPRGLVVLGFPCNQFGHQENAKNEEILNSLKYVRPGGGFEPNFMLFEKCEVNGAGAHPLFAFLREALPAPSDDATALMTDPKLITWSPVCRNDVAWNFEKFLVGPDGVPLRRYSRRFQTIDIEPDIEALLSQGPSCA

SEQ ID NO: 204 - protein, 202 aa, Artificial Sequence
  Artificial mutant polypeptide
  MUTAGEN (84)..(84)
  BINDING (48)..(48): Selenium
  SITE (48)..(48): Amino acid at position 48 is selenocysteine (Sec)
CAARLAAAAAAAQSVYAFSARPLAGGEPVSLGSLRGKVLLIENVASLXGTTVRDYTQMNELQRRLGPRGLVVLGFPCNQFGHQQNAKNEEILNSLKYVRPGGGFEPNFMLFEKCEVNGAGAHPLFAFLREALPAPSDDATALMTDPKLITWSPVCRNDVAWNFEKFLVGPDGVPLRRYSRRFQTIDIEPDIEALLSQGPSCA

SEQ ID NO: 205 - protein, 202 aa, Artificial Sequence
  Artificial mutant polypeptide
  MUTAGEN (89)..(89)
  BINDING (48)..(48): Selenium
  SITE (48)..(48): Amino acid at position 48 is selenocysteine (Sec)
CAARLAAAAAAAQSVYAFSARPLAGGEPVSLGSLRGKVLLIENVASLXGTTVRDYTQMNELQRRLGPRGLVVLGFPCNQFGHQENAKNQEILNSLKYVRPGGGFEPNFMLFEKCEVNGAGAHPLFAFLREALPAPSDDATALMTDPKLITWSPVCRNDVAWNFEKFLVGPDGVPLRRYSRRFQTIDIEPDIEALLSQGPSCA

SEQ ID NO: 206 - protein, 202 aa, Artificial Sequence
  Artificial mutant polypeptide
  MUTAGEN (90)..(90)
  BINDING (48)..(48): Selenium
  SITE (48)..(48): Amino acid at position 48 is selenocysteine (Sec)
CAARLAAAAAAAQSVYAFSARPLAGGEPVSLGSLRGKVLLIENVASLXGTTVRDYTQMNELQRRLGPRGLVVLGFPCNQFGHQENAKNEQILNSLKYVRPGGGFEPNFMLFEKCEVNGAGAHPLFAFLREALPAPSDDATALMTDPKLITWSPVCRNDVAWNFEKFLVGPDGVPLRRYSRRFQTIDIEPDIEALLSQGPSCA

SEQ ID NO: 207 - protein, 202 aa, Artificial Sequence
  Artificial mutant polypeptide
  MUTAGEN (105)..(105)
  BINDING (48)..(48): Selenium
  SITE (48)..(48): Amino acid at position 48 is selenocysteine (Sec)
CAARLAAAAAAAQSVYAFSARPLAGGEPVSLGSLRGKVLLIENVASLXGTTVRDYTQMNELQRRLGPRGLVVLGFPCNQFGHQENAKNEEILNSLKYVRPGGGFQPNFMLFEKCEVNGAGAHPLFAFLREALPAPSDDATALMTDPKLITWSPVCRNDVAWNFEKFLVGPDGVPLRRYSRRFQTIDIEPDIEALLSQGPSCA

SEQ ID NO: 208 - protein, 202 aa, Artificial Sequence
  Artificial mutant polypeptide
  MUTAGEN (112)..(112)
  BINDING (48)..(48): Selenium
  SITE (48)..(48): Amino acid at position 48 is selenocysteine (Sec)
CAARLAAAAAAAQSVYAFSARPLAGGEPVSLGSLRGKVLLIENVASLXGTTVRDYTQMNELQRRLGPRGLVVLGFPCNQFGHQENAKNEEILNSLKYVRPGGGFEPNFMLFQKCEVNGAGAHPLFAFLREALPAPSDDATALMTDPKLITWSPVCRNDVAWNFEKFLVGPDGVPLRRYSRRFQTIDIEPDIEALLSQGPSCA

SEQ ID NO: 209 - protein, 202 aa, Artificial Sequence
  Artificial mutant polypeptide
  MUTAGEN (115)..(115)
  BINDING (48)..(48): Selenium
  SITE (48)..(48): Amino acid at position 48 is selenocysteine (Sec)
CAARLAAAAAAAQSVYAFSARPLAGGEPVSLGSLRGKVLLIENVASLXGTTVRDYTQMNELQRRLGPRGLVVLGFPCNQFGHQENAKNEEILNSLKYVRPGGGFEPNFMLFEKCQVNGAGAHPLFAFLREALPAPSDDATALMTDPKLITWSPVCRNDVAWNFEKFLVGPDGVPLRRYSRRFQTIDIEPDIEALLSQGPSCA

SEQ ID NO: 210 - protein, 202 aa, Artificial Sequence
  Artificial mutant polypeptide
  MUTAGEN (130)..(130)
  BINDING (48)..(48): Selenium
  SITE (48)..(48): Amino acid at position 48 is selenocysteine (Sec)
CAARLAAAAAAAQSVYAFSARPLAGGEPVSLGSLRGKVLLIENVASLXGTTVRDYTQMNELQRRLGPRGLVVLGFPCNQFGHQENAKNEEILNSLKYVRPGGGFEPNFMLFEKCEVNGAGAHPLFAFLRQALPAPSDDATALMTDPKLITWSPVCRNDVAWNFEKFLVGPDGVPLRRYSRRFQTIDIEPDIEALLSQGPSCA

SEQ ID NO: 211 - protein, 202 aa, Artificial Sequence
  Artificial mutant polypeptide
  MUTAGEN (164)..(164)
  BINDING (48)..(48): Selenium
  SITE (48)..(48): Amino acid at position 48 is selenocysteine (Sec)
CAARLAAAAAAAQSVYAFSARPLAGGEPVSLGSLRGKVLLIENVASLXGTTVRDYTQMNELQRRLGPRGLVVLGFPCNQFGHQENAKNEEILNSLKYVRPGGGFEPNFMLFEKCEVNGAGAHPLFAFLREALPAPSDDATALMTDPKLITWSPVCRNDVAWNFQKFLVGPDGVPLRRYSRRFQTIDIEPDIEALLSQGPSCA

SEQ ID NO: 212 - protein, 202 aa, Artificial Sequence
  Artificial mutant polypeptide
  MUTAGEN (188)..(188)
  BINDING (48)..(48): Selenium
  SITE (48)..(48): Amino acid at position 48 is selenocysteine (Sec)
CAARLAAAAAAAQSVYAFSARPLAGGEPVSLGSLRGKVLLIENVASLXGTTVRDYTQMNELQRRLGPRGLVVLGFPCNQFGHQENAKNEEILNSLKYVRPGGGFEPNFMLFEKCEVNGAGAHPLFAFLREALPAPSDDATALMTDPKLITWSPVCRNDVAWNFEKFLVGPDGVPLRRYSRRFQTIDIQPDIEALLSQGPSCA

SEQ ID NO: 213 - protein, 202 aa, Artificial Sequence
  Artificial mutant polypeptide
  MUTAGEN (192)..(192)
  BINDING (48)..(48): Selenium
  SITE (48)..(48): Amino acid at position 48 is selenocysteine (Sec)
CAARLAAAAAAAQSVYAFSARPLAGGEPVSLGSLRGKVLLIENVASLXGTTVRDYTQMNELQRRLGPRGLVVLGFPCNQFGHQENAKNEEILNSLKYVRPGGGFEPNFMLFEKCEVNGAGAHPLFAFLREALPAPSDDATALMTDPKLITWSPVCRNDVAWNFEKFLVGPDGVPLRRYSRRFQTIDIEPDIQALLSQGPSCA

SEQ ID NO: 214 - protein, 202 aa, Artificial Sequence
  Artificial mutant polypeptide
  MUTAGEN (13)..(13)
  BINDING (48)..(48)
CAARLAAAAAAAESVYAFSARPLAGGEPVSLGSLRGKVLLIENVASLXGTTVRDYTQMNELQRRLGPRGLVVLGFPCNQFGHQENAKNEEILNSLKYVRPGGGFEPNFMLFEKCEVNGAGAHPLFAFLREALPAPSDDATALMTDPKLITWSPVCRNDVAWNFEKFLVGPDGVPLRRYSRRFQTIDIEPDIEALLSQGPSCA

SEQ ID NO: 215 - protein, 202 aa, Artificial Sequence
  Artificial mutant polypeptide
  MUTAGEN (57)..(57)
  BINDING (48)..(48): Selenium
  SITE (48)..(48): Amino acid at position 48 is selenocysteine (Sec)
CAARLAAAAAAAQSVYAFSARPLAGGEPVSLGSLRGKVLLIENVASLXGTTVRDYTEMNELQRRLGPRGLVVLGFPCNQFGHQENAKNEEILNSLKYVRPGGGFEPNFMLFEKCEVNGAGAHPLFAFLREALPAPSDDATALMTDPKLITWSPVCRNDVAWNFEKFLVGPDGVPLRRYSRRFQTIDIEPDIEALLSQGPSCA

SEQ ID NO: 216 - protein, 202 aa, Artificial Sequence
  Artificial mutant polypeptide
  MUTAGEN (62)..(62)
  BINDING (48)..(48): Selenium
  SITE (48)..(48): Amino acid at position 48 is selenocysteine (Sec)
CAARLAAAAAAAQSVYAFSARPLAGGEPVSLGSLRGKVLLIENVASLXGTTVRDYTQMNELERRLGPRGLVVLGFPCNQFGHQENAKNEEILNSLKYVRPGGGFEPNFMLFEKCEVNGAGAHPLFAFLREALPAPSDDATALMTDPKLITWSPVCRNDVAWNFEKFLVGPDGVPLRRYSRRFQTIDIEPDIEALLSQGPSCA

SEQ ID NO: 217 - protein, 202 aa, Artificial Sequence
  Artificial mutant polypeptide
  MUTAGEN (79)..(79)
  BINDING (48)..(48): Selenium
  SITE (48)..(48): Amino acid at position 48 is selenocysteine (Sec)
CAARLAAAAAAAQSVYAFSARPLAGGEPVSLGSLRGKVLLIENVASLXGTTVRDYTQMNELQRRLGPRGLVVLGFPCNEFGHQENAKNEEILNSLKYVRPGGGFEPNFMLFEKCEVNGAGAHPLFAFLREALPAPSDDATALMTDPKLITWSPVCRNDVAWNFEKFLVGPDGVPLRRYSRRFQTIDIEPDIEALLSQGPSCA

SEQ ID NO: 218 - protein, 202 aa, Artificial Sequence
  Artificial mutant polypeptide
  MUTAGEN (83)..(83)
  BINDING (48)..(48): Selenium
  SITE (48)..(48): Amino acid at position 48 is selenocysteine (Sec)
CAARLAAAAAAAQSVYAFSARPLAGGEPVSLGSLRGKVLLIENVASLXGTTVRDYTQMNELQRRLGPRGLVVLGFPCNQFGHEENAKNEEILNSLKYVRPGGGFEPNFMLFEKCEVNGAGAHPLFAFLREALPAPSDDATALMTDPKLITWSPVCRNDVAWNFEKFLVGPDGVPLRRYSRRFQTIDIEPDIEALLSQGPSCA

SEQ ID NO: 219 - protein, 202 aa, Artificial Sequence
  Artificial mutant polypeptide
  MUTAGEN (183)..(183)
  BINDING (48)..(48): Selenium
  SITE (48)..(48): Amino acid at position 48 is selenocysteine (Sec)
CAARLAAAAAAAQSVYAFSARPLAGGEPVSLGSLRGKVLLIENVASLXGTTVRDYTQMNELQRRLGPRGLVVLGFPCNQFGHQENAKNEEILNSLKYVRPGGGFEPNFMLFEKCEVNGAGAHPLFAFLREALPAPSDDATALMTDPKLITWSPVCRNDVAWNFEKFLVGPDGVPLRRYSRRFETIDIEPDIEALLSQGPSCA

SEQ ID NO: 220 - protein, 202 aa, Artificial Sequence
  Artificial mutant polypeptide
  MUTAGEN (197)..(197)
  BINDING (48)..(48): Selenium
  SITE (48)..(48): Amino acid at position 48 is selenocysteine (Sec)
CAARLAAAAAAAQSVYAFSARPLAGGEPVSLGSLRGKVLLIENVASLXGTTVRDYTQMNELQRRLGPRGLVVLGFPCNQFGHQENAKNEEILNSLKYVRPGGGFEPNFMLFEKCEVNGAGAHPLFAFLREALPAPSDDATALMTDPKLITWSPVCRNDVAWNFEKFLVGPDGVPLRRYSRRFQTIDIEPDIEALLSEGPSCA

SEQ ID NO: 221 - protein, 202 aa, Artificial Sequence
  Artificial mutant polypeptide
  MUTAGEN (54)..(54)
  BINDING (48)..(48): Selenium
  SITE (48)..(48): Amino acid at position 48 is selenocysteine (Sec)
CAARLAAAAAAAQSVYAFSARPLAGGEPVSLGSLRGKVLLIENVASLXGTTVRNYTQMNELQRRLGPRGLVVLGFPCNQFGHQENAKNEEILNSLKYVRPGGGFEPNFMLFEKCEVNGAGAHPLFAFLREALPAPSDDATALMTDPKLITWSPVCRNDVAWNFEKFLVGPDGVPLRRYSRRFQTIDIEPDIEALLSQGPSCA

SEQ ID NO: 222 - protein, 202 aa, Artificial Sequence
  Artificial mutant polypeptide
  MUTAGEN (137)..(137)
  BINDING (48)..(48): Selenium
  SITE (48)..(48): Amino acid at position 48 is selenocysteine (Sec)
CAARLAAAAAAAQSVYAFSARPLAGGEPVSLGSLRGKVLLIENVASLXGTTVRDYTQMNELQRRLGPRGLVVLGFPCNQFGHQENAKNEEILNSLKYVRPGGGFEPNFMLFEKCEVNGAGAHPLFAFLREALPAPSNDATALMTDPKLITWSPVCRNDVAWNFEKFLVGPDGVPLRRYSRRFQTIDIEPDIEALLSQGPSCA

SEQ ID NO: 223 - protein, 202 aa, Artificial Sequence
  Artificial mutant polypeptide
  MUTAGEN (138)..(138)
  BINDING (48)..(48): Selenium
  SITE (48)..(48): Amino acid at position 48 is selenocysteine (Sec)
CAARLAAAAAAAQSVYAFSARPLAGGEPVSLGSLRGKVLLIENVASLXGTTVRDYTQMNELQRRLGPRGLVVLGFPCNQFGHQENAKNEEILNSLKYVRPGGGFEPNFMLFEKCEVNGAGAHPLFAFLREALPAPSDNATALMTDPKLITWSPVCRNDVAWNFEKFLVGPDGVPLRRYSRRFQTIDIEPDIEALLSQGPSCA

SEQ ID NO: 224 - protein, 202 aa, Artificial Sequence
  Artificial mutant polypeptide
  MUTAGEN (145)..(145)
  BINDING (48)..(48): Selenium
  SITE (48)..(48): Amino acid at position 48 is selenocysteine (Sec)
CAARLAAAAAAAQSVYAFSARPLAGGEPVSLGSLRGKVLLIENVASLXGTTVRDYTQMNELQRRLGPRGLVVLGFPCNQFGHQENAKNEEILNSLKYVRPGGGFEPNFMLFEKCEVNGAGAHPLFAFLREALPAPSDDATALMTNPKLITWSPVCRNDVAWNFEKFLVGPDGVPLRRYSRRFQTIDIEPDIEALLSQGPSCA

SEQ ID NO: 225 - protein, 202 aa, Artificial Sequence
  Artificial mutant polypeptide
  MUTAGEN (158)..(158)
  BINDING (48)..(48): Selenium
  SITE (48)..(48): Amino acid at position 48 is selenocysteine (Sec)
CAARLAAAAAAAQSVYAFSARPLAGGEPVSLGSLRGKVLLIENVASLXGTTVRDYTQMNELQRRLGPRGLVVLGFPCNQFGHQENAKNEEILNSLKYVRPGGGFEPNFMLFEKCEVNGAGAHPLFAFLREALPAPSDDATALMTDPKLITWSPVCRNNVAWNFEKFLVGPDGVPLRRYSRRFQTIDIEPDIEALLSQGPSCA

SEQ ID NO: 226 - protein, 202 aa, Artificial Sequence
  Artificial mutant polypeptide
  MUTAGEN (171)..(171)
  BINDING (48)..(48): Selenium
  SITE (48)..(48): Amino acid at position 48 is selenocysteine (Sec)
CAARLAAAAAAAQSVYAFSARPLAGGEPVSLGSLRGKVLLIENVASLXGTTVRDYTQMNELQRRLGPRGLVVLGFPCNQFGHQENAKNEEILNSLKYVRPGGGFEPNFMLFEKCEVNGAGAHPLFAFLREALPAPSDDATALMTDPKLITWSPVCRNDVAWNFEKFLVGPNGVPLRRYSRRFQTIDIEPDIEALLSQGPSCA

SEQ ID NO: 227 - protein, 202 aa, Artificial Sequence
  Artificial mutant polypeptide
  MUTAGEN (186)..(186)
  BINDING (48)..(48): Selenium
  SITE (48)..(48): Amino acid at position 48 is selenocysteine (Sec)
CAARLAAAAAAAQSVYAFSARPLAGGEPVSLGSLRGKVLLIENVASLXGTTVRDYTQMNELQRRLGPRGLVVLGFPCNQFGHQENAKNEEILNSLKYVRPGGGFEPNFMLFEKCEVNGAGAHPLFAFLREALPAPSDDATALMTDPKLITWSPVCRNDVAWNFEKFLVGPDGVPLRRYSRRFQTINIEPDIEALLSQGPSCA

SEQ ID NO: 228 - protein, 202 aa, Artificial Sequence
  Artificial mutant polypeptide
  MUTAGEN (190)..(190)
  BINDING (48)..(48): Selenium
  SITE (48)..(48): Amino acid at position 48 is selenocysteine (Sec)
CAARLAAAAAAAQSVYAFSARPLAGGEPVSLGSLRGKVLLIENVASLXGTTVRDYTQMNELQRRLGPRGLVVLGFPCNQFGHQENAKNEEILNSLKYVRPGGGFEPNFMLFEKCEVNGAGAHPLFAFLREALPAPSDDATALMTDPKLITWSPVCRNDVAWNFEKFLVGPDGVPLRRYSRRFQTIDIEPNIEALLSQGPSCA

SEQ ID NO: 229 - protein, 202 aa, Artificial Sequence
  Artificial mutant polypeptide
  MUTAGEN (43)..(43)
  BINDING (48)..(48): Selenium
  SITE (48)..(48): Amino acid at position 48 is selenocysteine (Sec)
CAARLAAAAAAAQSVYAFSARPLAGGEPVSLGSLRGKVLLIEDVASLXGTTVRDYTQMNELQRRLGPRGLVVLGFPCNQFGHQENAKNEEILNSLKYVRPGGGFEPNFMLFEKCEVNGAGAHPLFAFLREALPAPSDDATALMTDPKLITWSPVCRNDVAWNFEKFLVGPDGVPLRRYSRRFQTIDIEPDIEALLSQGPSCA

SEQ ID NO: 230 - protein, 202 aa, Artificial Sequence
  Artificial mutant polypeptide
  MUTAGEN (59)..(59)
  BINDING (48)..(48): Selenium
  SITE (48)..(48): Amino acid at position 48 is selenocysteine (Sec)
CAARLAAAAAAAQSVYAFSARPLAGGEPVSLGSLRGKVLLIENVASLXGTTVRDYTQMDELQRRLGPRGLVVLGFPCNQFGHQENAKNEEILNSLKYVRPGGGFEPNFMLFEKCEVNGAGAHPLFAFLREALPAPSDDATALMTDPKLITWSPVCRNDVAWNFEKFLVGPDGVPLRRYSRRFQTIDIEPDIEALLSQGPSCA

SEQ ID NO: 231 - protein, 202 aa, Artificial Sequence
  Artificial mutant polypeptide
  MUTAGEN (78)..(78)
  BINDING (48)..(48): Selenium
  SITE (48)..(48): Amino acid at position 48 is selenocysteine (Sec)
CAARLAAAAAAAQSVYAFSARPLAGGEPVSLGSLRGKVLLIENVASLXGTTVRDYTQMNELQRRLGPRGLVVLGFPCDQFGHQENAKNEEILNSLKYVRPGGGFEPNFMLFEKCEVNGAGAHPLFAFLREALPAPSDDATALMTDPKLITWSPVCRNDVAWNFEKFLVGPDGVPLRRYSRRFQTIDIEPDIEALLSQGPSCA

SEQ ID NO: 232 - protein, 202 aa, Artificial Sequence
  Artificial mutant polypeptide
  MUTAGEN (85)..(85)
  BINDING (48)..(48): Selenium
  SITE (48)..(48): Amino acid at position 48 is selenocysteine (Sec)
CAARLAAAAAAAQSVYAFSARPLAGGEPVSLGSLRGKVLLIENVASLXGTTVRDYTQMNELQRRLGPRGLVVLGFPCNQFGHQEDAKNEEILNSLKYVRPGGGFEPNFMLFEKCEVNGAGAHPLFAFLREALPAPSDDATALMTDPKLITWSPVCRNDVAWNFEKFLVGPDGVPLRRYSRRFQTIDIEPDIEALLSQGPSCA

SEQ ID NO: 233 - protein, 202 aa, Artificial Sequence
  Artificial mutant polypeptide
  MUTAGEN (88)..(88)
  BINDING (48)..(48): Selenium
  SITE (48)..(48): Amino acid at position 48 is selenocysteine (Sec)
CAARLAAAAAAAQSVYAFSARPLAGGEPVSLGSLRGKVLLIENVASLXGTTVRDYTQMNELQRRLGPRGLVVLGFPCNQFGHQENAKDEEILNSLKYVRPGGGFEPNFMLFEKCEVNGAGAHPLFAFLREALPAPSDDATALMTDPKLITWSPVCRNDVAWNFEKFLVGPDGVPLRRYSRRFQTIDIEPDIEALLSQGPSCA

SEQ ID NO: 234 - protein, 202 aa, Artificial Sequence
  Artificial mutant polypeptide
  MUTAGEN (93)..(93)
  BINDING (48)..(48): Selenium
  SITE (48)..(48): Amino acid at position 48 is selenocysteine (Sec)
CAARLAAAAAAAQSVYAFSARPLAGGEPVSLGSLRGKVLLIENVASLXGTTVRDYTQMNELQRRLGPRGLVVLGFPCNQFGHQENAKNEEILDSLKYVRPGGGFEPNFMLFEKCEVNGAGAHPLFAFLREALPAPSDDATALMTDPKLITWSPVCRNDVAWNFEKFLVGPDGVPLRRYSRRFQTIDIEPDIEALLSQGPSCA

SEQ ID NO: 235 - protein, 202 aa, Artificial Sequence
  Artificial mutant polypeptide
  MUTAGEN (107)..(107)
  BINDING (48)..(48): Selenium
  SITE (48)..(48): Amino acid at position 48 is selenocysteine (Sec)
CAARLAAAAAAAQSVYAFSARPLAGGEPVSLGSLRGKVLLIENVASLXGTTVRDYTQMNELQRRLGPRGLVVLGFPCNQFGHQENAKNEEILNSLKYVRPGGGFEPDFMLFEKCEVNGAGAHPLFAFLREALPAPSDDATALMTDPKLITWSPVCRNDVAWNFEKFLVGPDGVPLRRYSRRFQTIDIEPDIEALLSQGPSCA

SEQ ID NO: 236 - protein, 202 aa, Artificial Sequence
  Artificial mutant polypeptide
  MUTAGEN (117)..(117)
  BINDING (48)..(48): Selenium
  SITE (48)..(48): Amino acid at position 48 is selenocysteine (Sec)
CAARLAAAAAAAQSVYAFSARPLAGGEPVSLGSLRGKVLLIENVASLXGTTVRDYTQMNELQRRLGPRGLVVLGFPCNQFGHQENAKNEEILNSLKYVRPGGGFEPNFMLFEKCEVDGAGAHPLFAFLREALPAPSDDATALMTDPKLITWSPVCRNDVAWNFEKFLVGPDGVPLRRYSRRFQTIDIEPDIEALLSQGPSCA

SEQ ID NO: 237 - protein, 202 aa, Artificial Sequence
  Artificial mutant polypeptide
  MUTAGEN (157)..(157)
  BINDING (48)..(48): Selenium
  SITE (48)..(48): Amino acid at position 48 is selenocysteine (Sec)
CAARLAAAAAAAQSVYAFSARPLAGGEPVSLGSLRGKVLLIENVASLXGTTVRDYTQMNELQRRLGPRGLVVLGFPCNQFGHQENAKNEEILNSLKYVRPGGGFEPNFMLFEKCEVNGAGAHPLFAFLREALPAPSDDATALMTDPKLITWSPVCRDDVAWNFEKFLVGPDGVPLRRYSRRFQTIDIEPDIEALLSQGPSCA

SEQ ID NO: 238 - protein, 202 aa, Artificial Sequence
  Artificial mutant polypeptide
  MUTAGEN (162)..(162)
  BINDING (48)..(48): Selenium
  SITE (48)..(48): Amino acid at position 48 is selenocysteine (Sec)
CAARLAAAAAAAQSVYAFSARPLAGGEPVSLGSLRGKVLLIENVASLXGTTVRDYTQMNELQRRLGPRGLVVLGFPCNQFGHQENAKNEEILNSLKYVRPGGGFEPNFMLFEKCEVNGAGAHPLFAFLREALPAPSDDATALMTDPKLITWSPVCRNDVAWDFEKFLVGPDGVPLRRYSRRFQTIDIEPDIEALLSQGPSCA

SEQ ID NO: 239 - protein, 97 aa, Artificial Sequence
  Artificial mutant polypeptide
  MUTAGEN (27)..(27)
  BINDING (48)..(48): Selenium
  SITE (48)..(48): Amino acid at position 48 is selenocysteine (Sec)
CAARLAAAAAAAQSVYAFSARPLAGGQPVSLGSLRGKVLLIENVASLXGTTVRDYTQMNELQRRLGPRGLVVLGFPCNQFGHQVRRAERGGAGADVQ

SEQ ID NO: 240 - protein, 97 aa, Artificial Sequence
  Artificial mutant polypeptide
  MUTAGEN (42)..(42)
  BINDING (48)..(48): Selenium
  SITE (48)..(48): Amino acid at position 48 is selenocysteine (Sec)
CAARLAAAAAAAQSVYAFSARPLAGGEPVSLGSLRGKVLLIQNVASLXGTTVRDYTQMNELQRRLGPRGLVVLGFPCNQFGHQVRRAERGGAGADVQ

SEQ ID NO: 241 - protein, 97 aa, Artificial Sequence
  Artificial mutant polypeptide
  MUTAGEN (60)..(60)
  BINDING (48)..(48): Selenium
  SITE (48)..(48): Amino acid at position 48 is selenocysteine (Sec)
CAARLAAAAAAAQSVYAFSARPLAGGEPVSLGSLRGKVLLIENVASLXGTTVRDYTQMNQLQRRLGPRGLVVLGFPCNQFGHQVRRAERGGAGADVQ

SEQ ID NO: 242 - protein, 97 aa, Artificial Sequence
  Artificial mutant polypeptide
  MUTAGEN (88)..(88)
  BINDING (48)..(48): Selenium
  SITE (48)..(48): Amino acid at position 48 is selenocysteine (Sec)
CAARLAAAAAAAQSVYAFSARPLAGGEPVSLGSLRGKVLLIENVASLXGTTVRDYTQMNELQRRLGPRGLVVLGFPCNQFGHQVRRAQRGGAGADVQ

SEQ ID NO: 243 - protein, 97 aa, Artificial Sequence
  Artificial mutant polypeptide
  MUTAGEN (13)..(13)
  BINDING (48)..(48): Selenium
  SITE (48)..(48): Amino acid at position 48 is selenocysteine (Sec)
CAARLAAAAAAAESVYAFSARPLAGGEPVSLGSLRGKVLLIENVASLXGTTVRDYTQMNELQRRLGPRGLVVLGFPCNQFGHQVRRAERGGAGADVQ

SEQ ID NO: 244 - protein, 97 aa, Artificial Sequence
  Artificial mutant polypeptide
  MUTAGEN (57)..(57)
  BINDING (48)..(48): Selenium
  SITE (48)..(48): Amino acid at position 48 is selenocysteine (Sec)
CAARLAAAAAAAQSVYAFSARPLAGGEPVSLGSLRGKVLLIENVASLXGTTVRDYTEMNELQRRLGPRGLVVLGFPCNQFGHQVRRAERGGAGADVQ

SEQ ID NO: 245 - protein, 97 aa, Artificial Sequence
  Artificial mutant polypeptide
  MUTAGEN (62)..(62)
  BINDING (48)..(48): Selenium
  SITE (48)..(48): Amino acid at position 48 is selenocysteine (Sec)
CAARLAAAAAAAQSVYAFSARPLAGGEPVSLGSLRGKVLLIENVASLXGTTVRDYTQMNELERRLGPRGLVVLGFPCNQFGHQVRRAERGGAGADVQ

SEQ ID NO: 246 - protein, 97 aa, Artificial Sequence
  Artificial mutant polypeptide
  MUTAGEN (79)..(79)
  BINDING (48)..(48): Selenium
  SITE (48)..(48): Amino acid at position 48 is selenocysteine (Sec)
CAARLAAAAAAAQSVYAFSARPLAGGEPVSLGSLRGKVLLIENVASLXGTTVRDYTQMNELQRRLGPRGLVVLGFPCNEFGHQVRRAERGGAGADVQ

SEQ ID NO: 247 - protein, 97 aa, Artificial Sequence
  Artificial mutant polypeptide
  MUTAGEN (83)..(83)
  BINDING (48)..(48): Selenium
  SITE (48)..(48): Amino acid at position 48 is selenocysteine (Sec)
CAARLAAAAAAAQSVYAFSARPLAGGEPVSLGSLRGKVLLIENVASLXGTTVRDYTQMNELQRRLGPRGLVVLGFPCNQFGHEVRRAERGGAGADVQ

SEQ ID NO: 248 - protein, 97 aa, Artificial Sequence
  Artificial mutant polypeptide
  MUTAGEN (97)..(97)
  BINDING (48)..(48): Selenium
  SITE (48)..(48): Amino acid at position 48 is selenocysteine (Sec)
CAARLAAAAAAAQSVYAFSARPLAGGEPVSLGSLRGKVLLIENVASLXGTTVRDYTQMNELQRRLGPRGLVVLGFPCNQFGHQVRRAERGGAGADVE

SEQ ID NO: 249 - protein, 97 aa, Artificial Sequence
  Artificial mutant polypeptide
  MUTAGEN (54)..(54)
  BINDING (48)..(48): Selenium
  SITE (48)..(48): Amino acid at position 48 is selenocysteine (Sec)
CAARLAAAAAAAQSVYAFSARPLAGGEPVSLGSLRGKVLLIENVASLXGTTVRNYTQMNELQRRLGPRGLVVLGFPCNQFGHQVRRAERGGAGADVQ

SEQ ID NO: 250 - protein, 97 aa, Artificial Sequence
  Artificial mutant polypeptide
  MUTAGEN (95)..(95)
  BINDING (48)..(48): Selenium
  SITE (48)..(48): Amino acid at position 48 is selenocysteine (Sec)
CAARLAAAAAAAQSVYAFSARPLAGGEPVSLGSLRGKVLLIENVASLXGTTVRDYTQMNELQRRLGPRGLVVLGFPCNQFGHQVRRAERGGAGANVQ

SEQ ID NO: 251 - protein, 97 aa, Artificial Sequence
  Artificial mutant polypeptide
  MUTAGEN (43)..(43)
  BINDING (48)..(48): Selenium
  SITE (48)..(48): Amino acid at position 48 is selenocysteine (Sec)
CAARLAAAAAAAQSVYAFSARPLAGGEPVSLGSLRGKVLLIEDVASLXGTTVRDYTQMNELQRRLGPRGLVVLGFPCNQFGHQVRRAERGGAGADVQ

SEQ ID NO: 252 - protein, 97 aa, Artificial Sequence
  Artificial mutant polypeptide
  MUTAGEN (59)..(59)
  BINDING (48)..(48): Selenium
  SITE (48)..(48): Amino acid at position 48 is selenocysteine (Sec)
CAARLAAAAAAAQSVYAFSARPLAGGEPVSLGSLRGKVLLIENVASLXGTTVRDYTQMDELQRRLGPRGLVVLGFPCNQFGHQVRRAERGGAGADVQ

SEQ ID NO: 253 - protein, 97 aa, Artificial Sequence
  Artificial mutant polypeptide
  MUTAGEN (78)..(78)
  BINDING (48)..(48): Selenium
  SITE (48)..(48): Amino acid at position 48 is selenocysteine (Sec)
CAARLAAAAAAAQSVYAFSARPLAGGEPVSLGSLRGKVLLIENVASLXGTTVRDYTQMNELQRRLGPRGLVVLGFPCDQFGHQVRRAERGGAGADVQ

SEQ ID NO: 254 - protein, 189 aa, Artificial Sequence
  Artificial mutant polypeptide
  MUTAGEN (18)..(18)
  BINDING (39)..(39): Selenium
  SITE (39)..(39): Amino acid at position 39 is selenocysteine (Sec)
AFIAKSFYDLSAISLDGQKVDFNTFRGRAVLIENVASLXGTTTRDFTQLNELQCRFPRRLVVLGFPCNQFGHQENCQNEEILNSLKYVRPGGGYQPTFTLVQKCEVNGQNEHPVFAYLKDKLPYPYDDPFSLMTDPKLIIWSPVRRSDVAWNFEKFLIGPEGEPFRRYSRTFPTINIEPDIKRLLKVAI

SEQ ID NO: 255 - protein, 189 aa, Artificial Sequence
  Artificial mutant polypeptide
  MUTAGEN (33)..(33)
  BINDING (39)..(39): Selenium
  SITE (39)..(39): Amino acid at position 39 is selenocysteine (Sec)
AFIAKSFYDLSAISLDGEKVDFNTFRGRAVLIQNVASLXGTTTRDFTQLNELQCRFPRRLVVLGFPCNQFGHQENCQNEEILNSLKYVRPGGGYQPTFTLVQKCEVNGQNEHPVFAYLKDKLPYPYDDPFSLMTDPKLIIWSPVRRSDVAWNFEKFLIGPEGEPFRRYSRTFPTINIEPDIKRLLKVAI

SEQ ID NO: 256 - protein, 189 aa, Artificial Sequence
  Artificial mutant polypeptide
  MUTAGEN (51)..(51)
  BINDING (39)..(39): Selenium
  SITE (39)..(39): Amino acid at position 39 is selenocysteine (Sec)
AFIAKSFYDLSAISLDGEKVDFNTFRGRAVLIENVASLXGTTTRDFTQLNQLQCRFPRRLVVLGFPCNQFGHQENCQNEEILNSLKYVRPGGGYQPTFTLVQKCEVNGQNEHPVFAYLKDKLPYPYDDPFSLMTDPKLIIWSPVRRSDVAWNFEKFLIGPEGEPFRRYSRTFPTINIEPDIKRLLKVAI

SEQ ID NO: 257 - protein, 189 aa, Artificial Sequence
  Artificial mutant polypeptide
  MUTAGEN (74)..(74)
  BINDING (39)..(39): Selenium
  SITE (39)..(39): Amino acid at position 39 is selenocysteine (Sec)
AFIAKSFYDLSAISLDGEKVDFNTFRGRAVLIENVASLXGTTTRDFTQLNELQCRFPRRLVVLGFPCNQFGHQQNCQNEEILNSLKYVRPGGGYQPTFTLVQKCEVNGQNEHPVFAYLKDKLPYPYDDPFSLMTDPKLIIWSPVRRSDVAWNFEKFLIGPEGEPFRRYSRTFPTINIEPDIKRLLKVAI

SEQ ID NO: 258 - protein, 189 aa, Artificial Sequence
  Artificial mutant polypeptide
  MUTAGEN (79)..(79)
  BINDING (39)..(39): Selenium
  SITE (39)..(39): Amino acid at position 39 is selenocysteine (Sec)
AFIAKSFYDLSAISLDGEKVDFNTFRGRAVLIENVASLXGTTTRDFTQLNELQCRFPRRLVVLGFPCNQFGHQENCQNQEILNSLKYVRPGGGYQPTFTLVQKCEVNGQNEHPVFAYLKDKLPYPYDDPFSLMTDPKLIIWSPVRRSDVAWNFEKFLIGPEGEPFRRYSRTFPTINIEPDIKRLLKVAI

SEQ ID NO: 259 - protein, 189 aa, Artificial Sequence
  Artificial mutant polypeptide
  MUTAGEN (80)..(80)
  BINDING (39)..(39): Selenium
  SITE (39)..(39): Amino acid at position 39 is selenocysteine (Sec)
AFIAKSFYDLSAISLDGEKVDFNTFRGRAVLIENVASLXGTTTRDFTQLNELQCRFPRRLVVLGFPCNQFGHQENCQNEQILNSLKYVRPGGGYQPTFTLVQKCEVNGQNEHPVFAYLKDKLPYPYDDPFSLMTDPKLIIWSPVRRSDVAWNFEKFLIGPEGEPFRRYSRTFPTINIEPDIKRLLKVAI

SEQ ID NO: 260 - protein, 189 aa, Artificial Sequence
  Artificial mutant polypeptide
  MUTAGEN (105)..(105)
  BINDING (39)..(39): Selenium
  SITE (39)..(39): Amino acid at position 39 is selenocysteine (Sec)
AFIAKSFYDLSAISLDGEKVDFNTFRGRAVLIENVASLXGTTTRDFTQLNELQCRFPRRLVVLGFPCNQFGHQENCQNEEILNSLKYVRPGGGYQPTFTLVQKCQVNGQNEHPVFAYLKDKLPYPYDDPFSLMTDPKLIIWSPVRRSDVAWNFEKFLIGPEGEPFRRYSRTFPTINIEPDIKRLLKVAI

SEQ ID NO: 261 - protein, 189 aa, Artificial Sequence
  Artificial mutant polypeptide
  MUTAGEN (111)..(111)
  BINDING (39)..(39): Selenium
  SITE (39)..(39): Amino acid at position 39 is selenocysteine (Sec)
AFIAKSFYDLSAISLDGEKVDFNTFRGRAVLIENVASLXGTTTRDFTQLNELQCRFPRRLVVLGFPCNQFGHQENCQNEEILNSLKYVRPGGGYQPTFTLVQKCEVNGQNQHPVFAYLKDKLPYPYDDPFSLMTDPKLIIWSPVRRSDVAWNFEKFLIGPEGEPFRRYSRTFPTINIEPDIKRLLKVAI

SEQ ID NO: 262 - protein, 189 aa, Artificial Sequence
  Artificial mutant polypeptide
  MUTAGEN (154)..(154)
  BINDING (39)..(39): Selenium
  SITE (39)..(39): Amino acid at position 39 is selenocysteine (Sec)
AFIAKSFYDLSAISLDGEKVDFNTFRGRAVLIENVASLXGTTTRDFTQLNELQCRFPRRLVVLGFPCNQFGHQENCQNEEILNSLKYVRPGGGYQPTFTLVQKCEVNGQNEHPVFAYLKDKLPYPYDDPFSLMTDPKLIIWSPVRRSDVAWNFQKFLIGPEGEPFRRYSRTFPTINIEPDIKRLLKVAI

SEQ ID NO: 263 - protein, 189 aa, Artificial Sequence
  Artificial mutant polypeptide
  MUTAGEN (161)..(161)
  BINDING (39)..(39): Selenium
  SITE (39)..(39): Amino acid at position 39 is selenocysteine (Sec)
AFIAKSFYDLSAISLDGEKVDFNTFRGRAVLIENVASLXGTTTRDFTQLNELQCRFPRRLVVLGFPCNQFGHQENCQNEEILNSLKYVRPGGGYQPTFTLVQKCEVNGQNEHPVFAYLKDKLPYPYDDPFSLMTDPKLIIWSPVRRSDVAWNFEKFLIGPQGEPFRRYSRTFPTINIEPDIKRLLKVAI

SEQ ID NO: 264 - protein, 189 aa, Artificial Sequence
  Artificial mutant polypeptide
  MUTAGEN (163)..(163)
  BINDING (39)..(39): Selenium
  SITE (39)..(39): Amino acid at position 39 is selenocysteine (Sec)
AFIAKSFYDLSAISLDGEKVDFNTFRGRAVLIENVASLXGTTTRDFTQLNELQCRFPRRLVVLGFPCNQFGHQENCQNEEILNSLKYVRPGGGYQPTFTLVQKCEVNGQNEHPVFAYLKDKLPYPYDDPFSLMTDPKLIIWSPVRRSDVAWNFEKFLIGPEGQPFRRYSRTFPTINIEPDIKRLLKVAI

SEQ ID NO: 265 - protein, 189 aa, Artificial Sequence
  Artificial mutant polypeptide
  MUTAGEN (178)..(178)
  BINDING (39)..(39): Selenium
  SITE (39)..(39): Amino acid at position 39 is selenocysteine (Sec)
AFIAKSFYDLSAISLDGEKVDFNTFRGRAVLIENVASLXGTTTRDFTQLNELQCRFPRRLVVLGFPCNQFGHQENCQNEEILNSLKYVRPGGGYQPTFTLVQKCEVNGQNEHPVFAYLKDKLPYPYDDPFSLMTDPKLIIWSPVRRSDVAWNFEKFLIGPEGEPFRRYSRTFPTINIQPDIKRLLKVAI

SEQ ID NO: 266 - protein, 189 aa, Artificial Sequence
  Artificial mutant polypeptide
  MUTAGEN (48)..(48)
  BINDING (39)..(39): Selenium
  SITE (39)..(39): Amino acid at position 39 is selenocysteine (Sec)
AFIAKSFYDLSAISLDGEKVDFNTFRGRAVLIENVASLXGTTTRDFTELNELQCRFPRRLVVLGFPCNQFGHQENCQNEEILNSLKYVRPGGGYQPTFTLVQKCEVNGQNEHPVFAYLKDKLPYPYDDPFSLMTDPKLIIWSPVRRSDVAWNFEKFLIGPEGEPFRRYSRTFPTINIEPDIKRLLKVAI

SEQ ID NO: 267 - protein, 189 aa, Artificial Sequence
  Artificial mutant polypeptide
  MUTAGEN (53)..(53)
  BINDING (39)..(39): Selenium
  SITE (39)..(39): Amino acid at position 39 is selenocysteine (Sec)
AFIAKSFYDLSAISLDGEKVDFNTFRGRAVLIENVASLXGTTTRDFTQLNELECRFPRRLVVLGFPCNQFGHQENCQNEEILNSLKYVRPGGGYQPTFTLVQKCEVNGQNEHPVFAYLKDKLPYPYDDPFSLMTDPKLIIWSPVRRSDVAWNFEKFLIGPEGEPFRRYSRTFPTINIEPDIKRLLKVAI

SEQ ID NO: 268 - protein, 189 aa, Artificial Sequence
  Artificial mutant polypeptide
  MUTAGEN (69)..(69)
  BINDING (39)..(39): Selenium
  SITE (39)..(39): Amino acid at position 39 is selenocysteine (Sec)
AFIAKSFYDLSAISLDGEKVDFNTFRGRAVLIENVASLXGTTTRDFTQLNELQCRFPRRLVVLGFPCNEFGHQENCQNEEILNSLKYVRPGGGYQPTFTLVQKCEVNGQNEHPVFAYLKDKLPYPYDDPFSLMTDPKLIIWSPVRRSDVAWNFEKFLIGPEGEPFRRYSRTFPTINIEPDIKRLLKVAI

SEQ ID NO: 269 - protein, 189 aa, Artificial Sequence
  Artificial mutant polypeptide
  MUTAGEN (73)..(73)
  BINDING (39)..(39): Selenium
  SITE (39)..(39): Amino acid at position 39 is selenocysteine (Sec)
AFIAKSFYDLSAISLDGEKVDFNTFRGRAVLIENVASLXGTTTRDFTQLNELQCRFPRRLVVLGFPCNQFGHEENCQNEEILNSLKYVRPGGGYQPTFTLVQKCEVNGQNEHPVFAYLKDKLPYPYDDPFSLMTDPKLIIWSPVRRSDVAWNFEKFLIGPEGEPFRRYSRTFPTINIEPDIKRLLKVAI

SEQ ID NO: 270 - protein, 189 aa, Artificial Sequence
  Artificial mutant polypeptide
  MUTAGEN (77)..(77)
  BINDING (39)..(39): Selenium
  SITE (39)..(39): Amino acid at position 39 is selenocysteine (Sec)
AFIAKSFYDLSAISLDGEKVDFNTFRGRAVLIENVASLXGTTTRDFTQLNELQCRFPRRLVVLGFPCNQFGHQENCENEEILNSLKYVRPGGGYQPTFTLVQKCEVNGQNEHPVFAYLKDKLPYPYDDPFSLMTDPKLIIWSPVRRSDVAWNFEKFLIGPEGEPFRRYSRTFPTINIEPDIKRLLKVAI

SEQ ID NO: 271 - protein, 189 aa, Artificial Sequence
  Artificial mutant polypeptide
  MUTAGEN (95)..(95)
  BINDING (39)..(39): Selenium
  SITE (39)..(39): Amino acid at position 39 is selenocysteine (Sec)
AFIAKSFYDLSAISLDGEKVDFNTFRGRAVLIENVASLXGTTTRDFTQLNELQCRFPRRLVVLGFPCNQFGHQENCQNEEILNSLKYVRPGGGYEPTFTLVQKCEVNGQNEHPVFAYLKDKLPYPYDDPFSLMTDPKLIIWSPVRRSDVAWNFEKFLIGPEGEPFRRYSRTFPTINIEPDIKRLLKVAI

SEQ ID NO: 272 - protein, 189 aa, Artificial Sequence
  Artificial mutant polypeptide
  MUTAGEN (102)..(102)
  BINDING (39)..(39): Selenium
  SITE (39)..(39): Amino acid at position 39 is selenocysteine (Sec)
AFIAKSFYDLSAISLDGEKVDFNTFRGRAVLIENVASLXGTTTRDFTQLNELQCRFPRRLVVLGFPCNQFGHQENCQNEEILNSLKYVRPGGGYQPTFTLVEKCEVNGQNEHPVFAYLKDKLPYPYDDPFSLMTDPKLIIWSPVRRSDVAWNFEKFLIGPEGEPFRRYSRTFPTINIEPDIKRLLKVAI

SEQ ID NO: 273 - protein, 189 aa, Artificial Sequence
  Artificial mutant polypeptide
  MUTAGEN (109)..(109)
  BINDING (39)..(39): Selenium
  SITE (39)..(39): Amino acid at position 39 is selenocysteine (Sec)
AFIAKSFYDLSAISLDGEKVDFNTFRGRAVLIENVASLXGTTTRDFTQLNELQCRFPRRLVVLGFPCNQFGHQENCQNEEILNSLKYVRPGGGYQPTFTLVQKCEVNGENEHPVFAYLKDKLPYPYDDPFSLMTDPKLIIWSPVRRSDVAWNFEKFLIGPEGEPFRRYSRTFPTINIEPDIKRLLKVAI

SEQ ID NO: 274 - protein, 189 aa, Artificial Sequence
  Artificial mutant polypeptide
  MUTAGEN (9)..(9)
  BINDING (39)..(39): Selenium
  SITE (39)..(39): Amino acid at position 39 is selenocysteine (Sec)
AFIAKSFYNLSAISLDGEKVDFNTFRGRAVLIENVASLXGTTTRDFTQLNELQCRFPRRLVVLGFPCNQFGHQENCQNEEILNSLKYVRPGGGYQPTFTLVQKCEVNGQNEHPVFAYLKDKLPYPYDDPFSLMTDPKLIIWSPVRRSDVAWNFEKFLIGPEGEPFRRYSRTFPTINIEPDIKRLLKVAI

SEQ ID NO: 275 - protein, 189 aa, Artificial Sequence
  Artificial mutant polypeptide
  MUTAGEN (16)..(16)
  BINDING (39)..(39): Selenium
  SITE (39)..(39): Amino acid at position 39 is selenocysteine (Sec)
AFIAKSFYDLSAISLNGEKVDFNTFRGRAVLIENVASLXGTTTRDFTQLNELQCRFPRRLVVLGFPCNQFGHQENCQNEEILNSLKYVRPGGGYQPTFTLVQKCEVNGQNEHPVFAYLKDKLPYPYDDPFSLMTDPKLIIWSPVRRSDVAWNFEKFLIGPEGEPFRRYSRTFPTINIEPDIKRLLKVAI

SEQ ID NO: 276 - protein, 189 aa, Artificial Sequence
  Artificial mutant polypeptide
  MUTAGEN (21)..(21)
  BINDING (39)..(39): Selenium
  SITE (39)..(39): Amino acid at position 39 is selenocysteine (Sec)
AFIAKSFYDLSAISLDGEKVNFNTFRGRAVLIENVASLXGTTTRDFTQLNELQCRFPRRLVVLGFPCNQFGHQENCQNEEILNSLKYVRPGGGYQPTFTLVQKCEVNGQNEHPVFAYLKDKLPYPYDDPFSLMTDPKLIIWSPVRRSDVAWNFEKFLIGPEGEPFRRYSRTFPTINIEPDIKRLLKVAI

SEQ ID NO: 277 - protein, 189 aa, Artificial Sequence
  Artificial mutant polypeptide
  MUTAGEN (45)..(45)
  BINDING (39)..(39): Selenium
  SITE (39)..(39): Amino acid at position 39 is selenocysteine (Sec)
AFIAKSFYDLSAISLDGEKVDFNTFRGRAVLIENVASLXGTTTRNFTQLNELQCRFPRRLVVLGFPCNQFGHQENCQNEEILNSLKYVRPGGGYQPTFTLVQKCEVNGQNEHPVFAYLKDKLPYPYDDPFSLMTDPKLIIWSPVRRSDVAWNFEKFLIGPEGEPFRRYSRTFPTINIEPDIKRLLKVAI

SEQ ID NO: 278 - protein, 189 aa, Artificial Sequence
  Artificial mutant polypeptide
  MUTAGEN (120)..(120)
  BINDING (39)..(39): Selenium
  SITE (39)..(39): Amino acid at position 39 is selenocysteine (Sec)
AFIAKSFYDLSAISLDGEKVDFNTFRGRAVLIENVASLXGTTTRDFTQLNELQCRFPRRLVVLGFPCNQFGHQENCQNEEILNSLKYVRPGGGYQPTFTLVQKCEVNGQNEHPVFAYLKNKLPYPYDDPFSLMTDPKLIIWSPVRRSDVAWNFEKFLIGPEGEPFRRYSRTFPTINIEPDIKRLLKVAI

SEQ ID NO: 279 - protein, 189 aa, Artificial Sequence
  Artificial mutant polypeptide
  MUTAGEN (127)..(127)
  BINDING (39)..(39): Selenium
  SITE (39)..(39): Amino acid at position 39 is selenocysteine (Sec)
AFIAKSFYDLSAISLDGEKVDFNTFRGRAVLIENVASLXGTTTRDFTQLNELQCRFPRRLVVLGFPCNQFGHQENCQNEEILNSLKYVRPGGGYQPTFTLVQKCEVNGQNEHPVFAYLKDKLPYPYNDPFSLMTDPKLIIWSPVRRSDVAWNFEKFLIGPEGEPFRRYSRTFPTINIEPDIKRLLKVAI

SEQ ID NO: 280 - protein, 189 aa, Artificial Sequence
  Artificial mutant polypeptide
  MUTAGEN (128)..(128)
  BINDING (39)..(39): Selenium
  SITE (39)..(39): Amino acid at position 39 is selenocysteine (Sec)
AFIAKSFYDLSAISLDGEKVDFNTFRGRAVLIENVASLXGTTTRDFTQLNELQCRFPRRLVVLGFPCNQFGHQENCQNEEILNSLKYVRPGGGYQPTFTLVQKCEVNGQNEHPVFAYLKDKLPYPYDNPFSLMTDPKLIIWSPVRRSDVAWNFEKFLIGPEGEPFRRYSRTFPTINIEPDIKRLLKVAI

SEQ ID NO: 281 - protein, 189 aa, Artificial Sequence
  Artificial mutant polypeptide
  MUTAGEN (135)..(135)
  BINDING (39)..(39): Selenium
  SITE (39)..(39): Amino acid at position 39 is selenocysteine (Sec)
AFIAKSFYDLSAISLDGEKVDFNTFRGRAVLIENVASLXGTTTRDFTQLNELQCRFPRRLVVLGFPCNQFGHQENCQNEEILNSLKYVRPGGGYQPTFTLVQKCEVNGQNEHPVFAYLKDKLPYPYDDPFSLMTNPKLIIWSPVRRSDVAWNFEKFLIGPEGEPFRRYSRTFPTINIEPDIKRLLKVAI

SEQ ID NO: 282 - protein, 189 aa, Artificial Sequence
  Artificial mutant polypeptide
  MUTAGEN (148)..(148)
  BINDING (39)..(39): Selenium
  SITE (39)..(39): Amino acid at position 39 is selenocysteine (Sec)
AFIAKSFYDLSAISLDGEKVDFNTFRGRAVLIENVASLXGTTTRDFTQLNELQCRFPRRLVVLGFPCNQFGHQENCQNEEILNSLKYVRPGGGYQPTFTLVQKCEVNGQNEHPVFAYLKDKLPYPYDDPFSLMTDPKLIIWSPVRRSNVAWNFEKFLIGPEGEPFRRYSRTFPTINIEPDIKRLLKVAI

SEQ ID NO: 283 - protein, 189 aa, Artificial Sequence
  Artificial mutant polypeptide
  MUTAGEN (180)..(180)
  BINDING (39)..(39): Selenium
  SITE (39)..(39): Amino acid at position 39 is selenocysteine (Sec)
AFIAKSFYDLSAISLDGEKVDFNTFRGRAVLIENVASLXGTTTRDFTQLNELQCRFPRRLVVLGFPCNQFGHQENCQNEEILNSLKYVRPGGGYQPTFTLVQKCEVNGQNEHPVFAYLKDKLPYPYDDPFSLMTDPKLIIWSPVRRSDVAWNFEKFLIGPEGEPFRRYSRTFPTINIEPNIKRLLKVAI

SEQ ID NO: 284 - protein, 189 aa, Artificial Sequence
  Artificial mutant polypeptide
  MUTAGEN (23)..(23)
  BINDING (39)..(39): Selenium
  SITE (39)..(39): Amino acid at position 39 is selenocysteine (Sec)
AFIAKSFYDLSAISLDGEKVDFDTFRGRAVLIENVASLXGTTTRDFTQLNELQCRFPRRLVVLGFPCNQFGHQENCQNEEILNSLKYVRPGGGYQPTFTLVQKCEVNGQNEHPVFAYLKDKLPYPYDDPFSLMTDPKLIIWSPVRRSDVAWNFEKFLIGPEGEPFRRYSRTFPTINIEPDIKRLLKVAI

SEQ ID NO: 285 - protein, 189 aa, Artificial Sequence
  Artificial mutant polypeptide
  MUTAGEN (34)..(34)
  BINDING (39)..(39): Selenium
  SITE (39)..(39): Amino acid at position 39 is selenocysteine (Sec)
AFIAKSFYDLSAISLDGEKVDFNTFRGRAVLIEDVASLXGTTTRDFTQLNELQCRFPRRLVVLGFPCNQFGHQENCQNEEILNSLKYVRPGGGYQPTFTLVQKCEVNGQNEHPVFAYLKDKLPYPYDDPFSLMTDPKLIIWSPVRRSDVAWNFEKFLIGPEGEPFRRYSRTFPTINIEPDIKRLLKVAI

SEQ ID NO: 286 - protein, 189 aa, Artificial Sequence
  Artificial mutant polypeptide
  MUTAGEN (50)..(50)
  BINDING (39)..(39): Selenium
  SITE (39)..(39): Amino acid at position 39 is selenocysteine (Sec)
AFIAKSFYDLSAISLDGEKVDFNTFRGRAVLIENVASLXGTTTRDFTQLDELQCRFPRRLVVLGFPCNQFGHQENCQNEEILNSLKYVRPGGGYQPTFTLVQKCEVNGQNEHPVFAYLKDKLPYPYDDPFSLMTDPKLIIWSPVRRSDVAWNFEKFLIGPEGEPFRRYSRTFPTINIEPDIKRLLKVAI

SEQ ID NO: 287 - protein, 189 aa, Artificial Sequence
  Artificial mutant polypeptide
  MUTAGEN (68)..(68)
  BINDING (39)..(39): Selenium
  SITE (39)..(39): Amino acid at position 39 is selenocysteine (Sec)
AFIAKSFYDLSAISLDGEKVDFNTFRGRAVLIENVASLXGTTTRDFTQLNELQCRFPRRLVVLGFPCDQFGHQENCQNEEILNSLKYVRPGGGYQPTFTLVQKCEVNGQNEHPVFAYLKDKLPYPYDDPFSLMTDPKLIIWSPVRRSDVAWNFEKFLIGPEGEPFRRYSRTFPTINIEPDIKRLLKVAI

SEQ ID NO: 288 - protein, 189 aa, Artificial Sequence
  Artificial mutant polypeptide
  MUTAGEN (75)..(75)
  BINDING (39)..(39): Selenium
  SITE (39)..(39): Amino acid at position 39 is selenocysteine (Sec)
AFIAKSFYDLSAISLDGEKVDFNTFRGRAVLIENVASLXGTTTRDFTQLNELQCRFPRRLVVLGFPCNQFGHQEDCQNEEILNSLKYVRPGGGYQPTFTLVQKCEVNGQNEHPVFAYLKDKLPYPYDDPFSLMTDPKLIIWSPVRRSDVAWNFEKFLIGPEGEPFRRYSRTFPTINIEPDIKRLLKVAI

SEQ ID NO: 289 - protein, 189 aa, Artificial Sequence
  Artificial mutant polypeptide
  MUTAGEN (78)..(78)
  BINDING (39)..(39): Selenium
  SITE (39)..(39): Amino acid at position 39 is selenocysteine (Sec)
AFIAKSFYDLSAISLDGEKVDFNTFRGRAVLIENVASLXGTTTRDFTQLNELQCRFPRRLVVLGFPCNQFGHQENCQDEEILNSLKYVRPGGGYQPTFTLVQKCEVNGQNEHPVFAYLKDKLPYPYDDPFSLMTDPKLIIWSPVRRSDVAWNFEKFLIGPEGEPFRRYSRTFPTINIEPDIKRLLKVAI

SEQ ID NO: 290 - protein, 189 aa, Artificial Sequence
  Artificial mutant polypeptide
  MUTAGEN (83)..(83)
  BINDING (39)..(39): Selenium
  SITE (39)..(39): Amino acid at position 39 is selenocysteine (Sec)
AFIAKSFYDLSAISLDGEKVDFNTFRGRAVLIENVASLXGTTTRDFTQLNELQCRFPRRLVVLGFPCNQFGHQENCQNEEILDSLKYVRPGGGYQPTFTLVQKCEVNGQNEHPVFAYLKDKLPYPYDDPFSLMTDPKLIIWSPVRRSDVAWNFEKFLIGPEGEPFRRYSRTFPTINIEPDIKRLLKVAI

SEQ ID NO: 291 - protein, 189 aa, Artificial Sequence
  Artificial mutant polypeptide
  MUTAGEN (107)..(107)
  BINDING (39)..(39): Selenium
  SITE (39)..(39): Amino acid at position 39 is selenocysteine (Sec)
AFIAKSFYDLSAISLDGEKVDFNTFRGRAVLIENVASLXGTTTRDFTQLNELQCRFPRRLVVLGFPCNQFGHQENCQNEEILNSLKYVRPGGGYQPTFTLVQKCEVDGQNEHPVFAYLKDKLPYPYDDPFSLMTDPKLIIWSPVRRSDVAWNFEKFLIGPEGEPFRRYSRTFPTINIEPDIKRLLKVAI

SEQ ID NO: 292 - protein, 189 aa, Artificial Sequence
  Artificial mutant polypeptide
  MUTAGEN (110)..(110)
  BINDING (39)..(39): Selenium
  SITE (39)..(39): Amino acid at position 39 is selenocysteine (Sec)
AFIAKSFYDLSAISLDGEKVDFNTFRGRAVLIENVASLXGTTTRDFTQLNELQCRFPRRLVVLGFPCNQFGHQENCQNEEILNSLKYVRPGGGYQPTFTLVQKCEVNGQDEHPVFAYLKDKLPYPYDDPFSLMTDPKLIIWSPVRRSDVAWNFEKFLIGPEGEPFRRYSRTFPTINIEPDIKRLLKVAI

SEQ ID NO: 293 - protein, 189 aa, Artificial Sequence
  Artificial mutant polypeptide
  MUTAGEN (152)..(152)
  BINDING (39)..(39): Selenium
  SITE (39)..(39): Amino acid at position 39 is selenocysteine (Sec)
AFIAKSFYDLSAISLDGEKVDFNTFRGRAVLIENVASLXGTTTRDFTQLNELQCRFPRRLVVLGFPCNQFGHQENCQNEEILNSLKYVRPGGGYQPTFTLVQKCEVNGQNEHPVFAYLKDKLPYPYDDPFSLMTDPKLIIWSPVRRSDVAWDFEKFLIGPEGEPFRRYSRTFPTINIEPDIKRLLKVAI

SEQ ID NO: 294 - protein, 189 aa, Artificial Sequence
  Artificial mutant polypeptide
  MUTAGEN (176)..(176)
  BINDING (39)..(39): Selenium
  SITE (39)..(39): Amino acid at position 39 is selenocysteine (Sec)
AFIAKSFYDLSAISLDGEKVDFNTFRGRAVLIENVASLXGTTTRDFTQLNELQCRFPRRLVVLGFPCNQFGHQENCQNEEILNSLKYVRPGGGYQPTFTLVQKCEVNGQNEHPVFAYLKDKLPYPYDDPFSLMTDPKLIIWSPVRRSDVAWNFEKFLIGPEGEPFRRYSRTFPTIDIEPDIKRLLKVAI

SEQ ID NO: 295 - protein, 225 aa, Artificial Sequence
  Artificial mutant polypeptide
  MUTAGEN (25)..(25)
  BINDING (72)..(72): Selenium
  SITE (72)..(72): Amino acid at position 72 is selenocysteine (Sec)
ARLLQASCLLSLLLAGFVSQSRGQQKSKMDCHGGISGTIYEYGALTIDGEEYIPFKQYAGKYVLFVNVASYXGLTGQYIELNALQEELAPFGLVILGFPCNQFGKQEPGENSEILPTLKYVRPGGGFVPNFQLFEKGDVNGEKEQKFYTFLKNSCPPTSELLGTSDRLFWEPMKVHDIRWNFEKFLVGPDGIPIMRWHHRTTVSNVKMDILSYMRRQAALGVKRK

SEQ ID NO: 296 - protein, 225 aa, Artificial Sequence
  Artificial mutant polypeptide
  MUTAGEN (41)..(41)
  BINDING (72)..(72): Selenium
  SITE (72)..(72): Amino acid at position 72 is selenocysteine (Sec)
ARLLQASCLLSLLLAGFVSQSRGQEKSKMDCHGGISGTIYQYGALTIDGEEYIPFKQYAGKYVLFVNVASYXGLTGQYIELNALQEELAPFGLVILGFPCNQFGKQEPGENSEILPTLKYVRPGGGFVPNFQLFEKGDVNGEKEQKFYTFLKNSCPPTSELLGTSDRLFWEPMKVHDIRWNFEKFLVGPDGIPIMRWHHRTTVSNVKMDILSYMRRQAALGVKRK

SEQ ID NO: 297 - protein, 225 aa, Artificial Sequence
  Artificial mutant polypeptide
  MUTAGEN (50)..(50)
  BINDING (72)..(72): Selenium
  SITE (72)..(72): Amino acid at position 72 is selenocysteine (Sec)
ARLLQASCLLSLLLAGFVSQSRGQEKSKMDCHGGISGTIYEYGALTIDGQEYIPFKQYAGKYVLFVNVASYXGLTGQYIELNALQEELAPFGLVILGFPCNQFGKQEPGENSEILPTLKYVRPGGGFVPNFQLFEKGDVNGEKEQKFYTFLKNSCPPTSELLGTSDRLFWEPMKVHDIRWNFEKFLVGPDGIPIMRWHHRTTVSNVKMDILSYMRRQAALGVKRK

SEQ ID NO: 298 - protein, 225 aa, Artificial Sequence
  Artificial mutant polypeptide
  MUTAGEN (51)..(51)
  BINDING (72)..(72): Selenium
  SITE (72)..(72): Amino acid at position 72 is selenocysteine (Sec)
ARLLQASCLLSLLLAGFVSQSRGQEKSKMDCHGGISGTIYEYGALTIDGEQYIPFKQYAGKYVLFVNVASYXGLTGQYIELNALQEELAPFGLVILGFPCNQFGKQEPGENSEILPTLKYVRPGGGFVPNFQLFEKGDVNGEKEQKFYTFLKNSCPPTSELLGTSDRLFWEPMKVHDIRWNFEKFLVGPDGIPIMRWHHRTTVSNVKMDILSYMRRQAALGVKRK

SEQ ID NO: 299 - protein, 225 aa, Artificial Sequence
  Artificial mutant polypeptide
  MUTAGEN (80)..(80)
  BINDING (72)..(72): Selenium
  SITE (72)..(72): Amino acid at position 72 is selenocysteine (Sec)
ARLLQASCLLSLLLAGFVSQSRGQEKSKMDCHGGISGTIYEYGALTIDGEEYIPFKQYAGKYVLFVNVASYXGLTGQYIQLNALQEELAPFGLVILGFPCNQFGKQEPGENSEILPTLKYVRPGGGFVPNFQLFEKGDVNGEKEQKFYTFLKNSCPPTSELLGTSDRLFWEPMKVHDIRWNFEKFLVGPDGIPIMRWHHRTTVSNVKMDILSYMRRQAALGVKRK

SEQ ID NO: 300 - protein, 225 aa, Artificial Sequence
  Artificial mutant polypeptide
  MUTAGEN (86)..(86)
  BINDING (72)..(72): Selenium
  SITE (72)..(72): Amino acid at position 72 is selenocysteine (Sec)
ARLLQASCLLSLLLAGFVSQSRGQEKSKMDCHGGISGTIYEYGALTIDGEEYIPFKQYAGKYVLFVNVASYXGLTGQYIELNALQQELAPFGLVILGFPCNQFGKQEPGENSEILPTLKYVRPGGGFVPNFQLFEKGDVNGEKEQKFYTFLKNSCPPTSELLGTSDRLFWEPMKVHDIRWNFEKFLVGPDGIPIMRWHHRTTVSNVKMDILSYMRRQAALGVKRK

SEQ ID NO: 301 - protein, 225 aa, Artificial Sequence
  Artificial mutant polypeptide
  MUTAGEN (87)..(87)
  BINDING (72)..(72): Selenium
  SITE (72)..(72): Amino acid at position 72 is selenocysteine (Sec)
ARLLQASCLLSLLLAGFVSQSRGQEKSKMDCHGGISGTIYEYGALTIDGEEYIPFKQYAGKYVLFVNVASYXGLTGQYIELNALQEQLAPFGLVILGFPCNQFGKQEPGENSEILPTLKYVRPGGGFVPNFQLFEKGDVNGEKEQKFYTFLKNSCPPTSELLGTSDRLFWEPMKVHDIRWNFEKFLVGPDGIPIMRWHHRTTVSNVKMDILSYMRRQAALGVKRK

SEQ ID NO: 302 - protein, 225 aa, Artificial Sequence
  Artificial mutant polypeptide
  MUTAGEN (107)..(107)
  BINDING (72)..(72): Selenium
  SITE (72)..(72): Amino acid at position 72 is selenocysteine (Sec)
ARLLQASCLLSLLLAGFVSQSRGQEKSKMDCHGGISGTIYEYGALTIDGEEYIPFKQYAGKYVLFVNVASYXGLTGQYIELNALQEELAPFGLVILGFPCNQFGKQQPGENSEILPTLKYVRPGGGFVPNFQLFEKGDVNGEKEQKFYTFLKNSCPPTSELLGTSDRLFWEPMKVHDIRWNFEKFLVGPDGIPIMRWHHRTTVSNVKMDILSYMRRQAALGVKRK

SEQ ID NO: 303 - protein, 225 aa, Artificial Sequence
  Artificial mutant polypeptide
  MUTAGEN (110)..(110)
  BINDING (72)..(72): Selenium
  SITE (72)..(72): Amino acid at position 72 is selenocysteine (Sec)
ARLLQASCLLSLLLAGFVSQSRGQEKSKMDCHGGISGTIYEYGALTIDGEEYIPFKQYAGKYVLFVNVASYXGLTGQYIELNALQEELAPFGLVILGFPCNQFGKQEPGQNSEILPTLKYVRPGGGFVPNFQLFEKGDVNGEKEQKFYTFLKNSCPPTSELLGTSDRLFWEPMKVHDIRWNFEKFLVGPDGIPIMRWHHRTTVSNVKMDILSYMRRQAALGVKRK

SEQ ID NO: 304 - protein, 225 aa, Artificial Sequence
  Artificial mutant polypeptide
  MUTAGEN (113)..(113)
  BINDING (72)..(72): Selenium
  SITE (72)..(72): Amino acid at position 72 is selenocysteine (Sec)
ARLLQASCLLSLLLAGFVSQSRGQEKSKMDCHGGISGTIYEYGALTIDGEEYIPFKQYAGKYVLFVNVASYXGLTGQYIELNALQEELAPFGLVILGFPCNQFGKQEPGENSQILPTLKYVRPGGGFVPNFQLFEKGDVNGEKEQKFYTFLKNSCPPTSELLGTSDRLFWEPMKVHDIRWNFEKFLVGPDGIPIMRWHHRTTVSNVKMDILSYMRRQAALGVKRK

SEQ ID NO: 305 - protein, 225 aa, Artificial Sequence
  Artificial mutant polypeptide
  MUTAGEN (135)..(135)
  BINDING (72)..(72): Selenium
  SITE (72)..(72): Amino acid at position 72 is selenocysteine (Sec)
ARLLQASCLLSLLLAGFVSQSRGQEKSKMDCHGGISGTIYEYGALTIDGEEYIPFKQYAGKYVLFVNVASYXGLTGQYIELNALQEELAPFGLVILGFPCNQFGKQEPGENSEILPTLKYVRPGGGFVPNFQLFQKGDVNGEKEQKFYTFLKNSCPPTSELLGTSDRLFWEPMKVHDIRWNFEKFLVGPDGIPIMRWHHRTTVSNVKMDILSYMRRQAALGVKRK

SEQ ID NO: 306 - protein, 225 aa, Artificial Sequence
  Artificial mutant polypeptide
  MUTAGEN (142)..(142)
  BINDING (72)..(72): Selenium
  SITE (72)..(72): Amino acid at position 72 is selenocysteine (Sec)
ARLLQASCLLSLLLAGFVSQSRGQEKSKMDCHGGISGTIYEYGALTIDGEEYIPFKQYAGKYVLFVNVASYXGLTGQYIELNALQEELAPFGLVILGFPCNQFGKQEPGENSEILPTLKYVRPGGGFVPNFQLFEKGDVNGQKEQKFYTFLKNSCPPTSELLGTSDRLFWEPMKVHDIRWNFEKFLVGPDGIPIMRWHHRTTVSNVKMDILSYMRRQAALGVKRK

SEQ ID NO: 307 - protein, 225 aa, Artificial Sequence
  Artificial mutant polypeptide
  MUTAGEN (144)..(144)
  BINDING (72)..(72): Selenium
  SITE (72)..(72): Amino acid at position 72 is selenocysteine (Sec)
ARLLQASCLLSLLLAGFVSQSRGQEKSKMDCHGGISGTIYEYGALTIDGEEYIPFKQYAGKYVLFVNVASYXGLTGQYIELNALQEELAPFGLVILGFPCNQFGKQEPGENSEILPTLKYVRPGGGFVPNFQLFEKGDVNGEKQQKFYTFLKNSCPPTSELLGTSDRLFWEPMKVHDIRWNFEKFLVGPDGIPIMRWHHRTTVSNVKMDILSYMRRQAALGVKRK

SEQ ID NO: 308 - protein, 225 aa, Artificial Sequence
  Artificial mutant polypeptide
  MUTAGEN (160)..(160)
  BINDING (72)..(72): Selenium
  SITE (72)..(72): Amino acid at position 72 is selenocysteine (Sec)
ARLLQASCLLSLLLAGFVSQSRGQEKSKMDCHGGISGTIYEYGALTIDGEEYIPFKQYAGKYVLFVNVASYXGLTGQYIELNALQEELAPFGLVILGFPCNQFGKQEPGENSEILPTLKYVRPGGGFVPNFQLFEKGDVNGEKEQKFYTFLKNSCPPTSQLLGTSDRLFWEPMKVHDIRWNFEKFLVGPDGIPIMRWHHRTTVSNVKMDILSYMRRQAALGVKRK

SEQ ID NO: 309 - protein, 225 aa, Artificial Sequence
  Artificial mutant polypeptide
  MUTAGEN (171)..(171)
  BINDING (72)..(72): Selenium
  SITE (72)..(72): Amino acid at position 72 is selenocysteine (Sec)
ARLLQASCLLSLLLAGFVSQSRGQEKSKMDCHGGISGTIYEYGALTIDGEEYIPFKQYAGKYVLFVNVASYXGLTGQYIELNALQEELAPFGLVILGFPCNQFGKQEPGENSEILPTLKYVRPGGGFVPNFQLFEKGDVNGEKEQKFYTFLKNSCPPTSELLGTSDRLFWQPMKVHDIRWNFEKFLVGPDGIPIMRWHHRTTVSNVKMDILSYMRRQAALGVKRK

SEQ ID NO: 310 - protein, 225 aa, Artificial Sequence
  Artificial mutant polypeptide
  MUTAGEN (183)..(183)
  BINDING (72)..(72): Selenium
  SITE (72)..(72): Amino acid at position 72 is selenocysteine (Sec)
ARLLQASCLLSLLLAGFVSQSRGQEKSKMDCHGGISGTIYEYGALTIDGEEYIPFKQYAGKYVLFVNVASYXGLTGQYIELNALQEELAPFGLVILGFPCNQFGKQEPGENSEILPTLKYVRPGGGFVPNFQLFEKGDVNGEKEQKFYTFLKNSCPPTSELLGTSDRLFWEPMKVHDIRWNFQKFLVGPDGIPIMRWHHRTTVSNVKMDILSYMRRQAALGVKRK

SEQ ID NO: 311 - protein, 225 aa, Artificial Sequence
  Artificial mutant polypeptide
  MUTAGEN (5)..(5)
  BINDING (72)..(72): Selenium
  SITE (72)..(72): Amino acid at position 72 is selenocysteine (Sec)
ARLLEASCLLSLLLAGFVSQSRGQEKSKMDCHGGISGTIYEYGALTIDGEEYIPFKQYAGKYVLFVNVASYXGLTGQYIELNALQEELAPFGLVILGFPCNQFGKQEPGENSEILPTLKYVRPGGGFVPNFQLFEKGDVNGEKEQKFYTFLKNSCPPTSELLGTSDRLFWEPMKVHDIRWNFEKFLVGPDGIPIMRWHHRTTVSNVKMDILSYMRRQAALGVKRK

SEQ ID NO: 312 - protein, 225 aa, Artificial Sequence
  Artificial mutant polypeptide
  MUTAGEN (20)..(20)
  BINDING (72)..(72): Selenium
  SITE (72)..(72): Amino acid at position 72 is selenocysteine (Sec)
ARLLQASCLLSLLLAGFVSESRGQEKSKMDCHGGISGTIYEYGALTIDGEEYIPFKQYAGKYVLFVNVASYXGLTGQYIELNALQEELAPFGLVILGFPCNQFGKQEPGENSEILPTLKYVRPGGGFVPNFQLFEKGDVNGEKEQKFYTFLKNSCPPTSELLGTSDRLFWEPMKVHDIRWNFEKFLVGPDGIPIMRWHHRTTVSNVKMDILSYMRRQAALGVKRK

SEQ ID NO: 313 - protein, 225 aa, Artificial Sequence
  Artificial mutant polypeptide
  MUTAGEN (24)..(24)
  BINDING (72)..(72): Selenium
  SITE (72)..(72): Amino acid at position 72 is selenocysteine (Sec)
ARLLQASCLLSLLLAGFVSQSRGEEKSKMDCHGGISGTIYEYGALTIDGEEYIPFKQYAGKYVLFVNVASYXGLTGQYIELNALQEELAPFGLVILGFPCNQFGKQEPGENSEILPTLKYVRPGGGFVPNFQLFEKGDVNGEKEQKFYTFLKNSCPPTSELLGTSDRLFWEPMKVHDIRWNFEKFLVGPDGIPIMRWHHRTTVSNVKMDILSYMRRQAALGVKRK

SEQ ID NO: 314 - protein, 225 aa, Artificial Sequence
  Artificial mutant polypeptide
  MUTAGEN (57)..(57)
  BINDING (72)..(72): Selenium
  SITE (72)..(72): Amino acid at position 72 is selenocysteine (Sec)
ARLLQASCLLSLLLAGFVSQSRGQEKSKMDCHGGISGTIYEYGALTIDGEEYIPFKEYAGKYVLFVNVASYXGLTGQYIELNALQEELAPFGLVILGFPCNQFGKQEPGENSEILPTLKYVRPGGGFVPNFQLFEKGDVNGEKEQKFYTFLKNSCPPTSELLGTSDRLFWEPMKVHDIRWNFEKFLVGPDGIPIMRWHHRTTVSNVKMDILSYMRRQAALGVKRK

SEQ ID NO: 315 - protein, 225 aa, Artificial Sequence
  Artificial mutant polypeptide
  MUTAGEN (77)..(77)
  BINDING (72)..(72): Selenium
  SITE (72)..(72): Amino acid at position 72 is selenocysteine (Sec)
ARLLQASCLLSLLLAGFVSQSRGQEKSKMDCHGGISGTIYEYGALTIDGEEYIPFKQYAGKYVLFVNVASYXGLTGEYIELNALQEELAPFGLVILGFPCNQFGKQEPGENSEILPTLKYVRPGGGFVPNFQLFEKGDVNGEKEQKFYTFLKNSCPPTSELLGTSDRLFWEPMKVHDIRWNFEKFLVGPDGIPIMRWHHRTTVSNVKMDILSYMRRQAALGVKRK

SEQ ID NO: 316 - protein, 225 aa, Artificial Sequence
  Artificial mutant polypeptide
  MUTAGEN (85)..(85)
  BINDING (72)..(72): Selenium
  SITE (72)..(72): Amino acid at position 72 is selenocysteine (Sec)
ARLLQASCLLSLLLAGFVSQSRGQEKSKMDCHGGISGTIYEYGALTIDGEEYIPFKQYAGKYVLFVNVASYXGLTGQYIELNALEEELAPFGLVILGFPCNQFGKQEPGENSEILPTLKYVRPGGGFVPNFQLFEKGDVNGEKEQKFYTFLKNSCPPTSELLGTSDRLFWEPMKVHDIRWNFEKFLVGPDGIPIMRWHHRTTVSNVKMDILSYMRRQAALGVKRK

SEQ ID NO: 317 - protein, 225 aa, Artificial Sequence
  Artificial mutant polypeptide
  MUTAGEN (102)..(102)
  BINDING (72)..(72): Selenium
  SITE (72)..(72): Amino acid at position 72 is selenocysteine (Sec)
ARLLQASCLLSLLLAGFVSQSRGQEKSKMDCHGGISGTIYEYGALTIDGEEYIPFKQYAGKYVLFVNVASYXGLTGQYIELNALQEELAPFGLVILGFPCNEFGKQEPGENSEILPTLKYVRPGGGFVPNFQLFEKGDVNGEKEQKFYTFLKNSCPPTSELLGTSDRLFWEPMKVHDIRWNFEKFLVGPDGIPIMRWHHRTTVSNVKMDILSYMRRQAALGVKRK

SEQ ID NO: 318 - protein, 225 aa, Artificial Sequence
  Artificial mutant polypeptide
  MUTAGEN (106)..(106)
  BINDING (72)..(72): Selenium
  SITE (72)..(72): Amino acid at position 72 is selenocysteine (Sec)
ARLLQASCLLSLLLAGFVSQSRGQEKSKMDCHGGISGTIYEYGALTIDGEEYIPFKQYAGKYVLFVNVASYXGLTGQYIELNALQEELAPFGLVILGFPCNQFGKEEPGENSEILPTLKYVRPGGGFVPNFQLFEKGDVNGEKEQKFYTFLKNSCPPTSELLGTSDRLFWEPMKVHDIRWNFEKFLVGPDGIPIMRWHHRTTVSNVKMDILSYMRRQAALGVKRK

SEQ ID NO: 319 - protein, 225 aa, Artificial Sequence
  Artificial mutant polypeptide
  MUTAGEN (132)..(132)
  BINDING (72)..(72): Selenium
  SITE (72)..(72): Amino acid at position 72 is selenocysteine (Sec)
ARLLQASCLLSLLLAGFVSQSRGQEKSKMDCHGGISGTIYEYGALTIDGEEYIPFKQYAGKYVLFVNVASYXGLTGQYIELNALQEELAPFGLVILGFPCNQFGKQEPGENSEILPTLKYVRPGGGFVPNFELFEKGDVNGEKEQKFYTFLKNSCPPTSELLGTSDRLFWEPMKVHDIRWNFEKFLVGPDGIPIMRWHHRTTVSNVKMDILSYMRRQAALGVKRK

SEQ ID NO: 320 - protein, 225 aa, Artificial Sequence
  Artificial mutant polypeptide
  MUTAGEN (145)..(145)
  BINDING (72)..(72): Selenium
  SITE (72)..(72): Amino acid at position 72 is selenocysteine (Sec)
ARLLQASCLLSLLLAGFVSQSRGQEKSKMDCHGGISGTIYEYGALTIDGEEYIPFKQYAGKYVLFVNVASYXGLTGQYIELNALQEELAPFGLVILGFPCNQFGKQEPGENSEILPTLKYVRPGGGFVPNFQLFEKGDVNGEKEEKFYTFLKNSCPPTSELLGTSDRLFWEPMKVHDIRWNFEKFLVGPDGIPIMRWHHRTTVSNVKMDILSYMRRQAALGVKRK

SEQ ID NO: 321 - protein, 225 aa, Artificial Sequence
  Artificial mutant polypeptide
  MUTAGEN (217)..(217)
  BINDING (72)..(72): Selenium
  SITE (72)..(72): Amino acid at position 72 is selenocysteine (Sec)
ARLLQASCLLSLLLAGFVSQSRGQEKSKMDCHGGISGTIYEYGALTIDGEEYIPFKQYAGKYVLFVNVASYXGLTGQYIELNALQEELAPFGLVILGFPCNQFGKQEPGENSEILPTLKYVRPGGGFVPNFQLFEKGDVNGEKEQKFYTFLKNSCPPTSELLGTSDRLFWEPMKVHDIRWNFEKFLVGPDGIPIMRWHHRTTVSNVKMDILSYMRREAALGVKRK

SEQ ID NO: 322 - protein, 225 aa, Artificial Sequence
  Artificial mutant polypeptide
  MUTAGEN (30)..(30)
  BINDING (72)..(72): Selenium
  SITE (72)..(72): Amino acid at position 72 is selenocysteine (Sec)
ARLLQASCLLSLLLAGFVSQSRGQEKSKMNCHGGISGTIYEYGALTIDGEEYIPFKQYAGKYVLFVNVASYXGLTGQYIELNALQEELAPFGLVILGFPCNQFGKQEPGENSEILPTLKYVRPGGGFVPNFQLFEKGDVNGEKEQKFYTFLKNSCPPTSELLGTSDRLFWEPMKVHDIRWNFEKFLVGPDGIPIMRWHHRTTVSNVKMDILSYMRRQAALGVKRK

SEQ ID NO: 323 - protein, 225 aa, Artificial Sequence
  Artificial mutant polypeptide
  MUTAGEN (48)..(48)
  BINDING (72)..(72): Selenium
  SITE (72)..(72): Amino acid at position 72 is selenocysteine (Sec)
ARLLQASCLLSLLLAGFVSQSRGQEKSKMDCHGGISGTIYEYGALTINGEEYIPFKQYAGKYVLFVNVASYXGLTGQYIELNALQEELAPFGLVILGFPCNQFGKQEPGENSEILPTLKYVRPGGGFVPNFQLFEKGDVNGEKEQKFYTFLKNSCPPTSELLGTSDRLFWEPMKVHDIRWNFEKFLVGPDGIPIMRWHHRTTVSNVKMDILSYMRRQAALGVKRK

SEQ ID NO: 324 - protein, 225 aa, Artificial Sequence
  Artificial mutant polypeptide
  MUTAGEN (138)..(138)
  BINDING (72)..(72): Selenium
  SITE (72)..(72): Amino acid at position 72 is selenocysteine (Sec)
ARLLQASCLLSLLLAGFVSQSRGQEKSKMDCHGGISGTIYEYGALTIDGEEYIPFKQYAGKYVLFVNVASYXGLTGQYIELNALQEELAPFGLVILGFPCNQFGKQEPGENSEILPTLKYVRPGGGFVPNFQLFEKGNVNGEKEQKFYTFLKNSCPPTSELLGTSDRLFWEPMKVHDIRWNFEKFLVGPDGIPIMRWHHRTTVSNVKMDILSYMRRQAALGVKRK

SEQ ID NO: 325 - protein, 225 aa, Artificial Sequence
  Artificial mutant polypeptide
  MUTAGEN (166)..(166)
  BINDING (72)..(72): Selenium
  SITE (72)..(72): Amino acid at position 72 is selenocysteine (Sec)
ARLLQASCLLSLLLAGFVSQSRGQEKSKMDCHGGISGTIYEYGALTIDGEEYIPFKQYAGKYVLFVNVASYXGLTGQYIELNALQEELAPFGLVILGFPCNQFGKQEPGENSEILPTLKYVRPGGGFVPNFQLFEKGDVNGEKEQKFYTFLKNSCPPTSELLGTSNRLFWEPMKVHDIRWNFEKFLVGPDGIPIMRWHHRTTVSNVKMDILSYMRRQAALGVKRK

SEQ ID NO: 326 - protein, 225 aa, Artificial Sequence
  Artificial mutant polypeptide
  MUTAGEN (177)..(177)
  BINDING (72)..(72): Selenium
  SITE (72)..(72): Amino acid at position 72 is selenocysteine (Sec)
ARLLQASCLLSLLLAGFVSQSRGQEKSKMDCHGGISGTIYEYGALTIDGEEYIPFKQYAGKYVLFVNVASYXGLTGQYIELNALQEELAPFGLVILGFPCNQFGKQEPGENSEILPTLKYVRPGGGFVPNFQLFEKGDVNGEKEQKFYTFLKNSCPPTSELLGTSDRLFWEPMKVHNIRWNFEKFLVGPDGIPIMRWHHRTTVSNVKMDILSYMRRQAALGVKRK

SEQ ID NO: 327 - protein, 225 aa, Artificial Sequence
  Artificial mutant polypeptide
  MUTAGEN (190)..(190)
  BINDING (72)..(72): Selenium
  SITE (72)..(72): Amino acid at position 72 is selenocysteine (Sec)
ARLLQASCLLSLLLAGFVSQSRGQEKSKMDCHGGISGTIYEYGALTIDGEEYIPFKQYAGKYVLFVNVASYXGLTGQYIELNALQEELAPFGLVILGFPCNQFGKQEPGENSEILPTLKYVRPGGGFVPNFQLFEKGDVNGEKEQKFYTFLKNSCPPTSELLGTSDRLFWEPMKVHDIRWNFEKFLVGPNGIPIMRWHHRTTVSNVKMDILSYMRRQAALGVKRK

SEQ ID NO: 328 - protein, 225 aa, Artificial Sequence
  Artificial mutant polypeptide
  MUTAGEN (209)..(209)
  BINDING (72)..(72): Selenium
  SITE (72)..(72): Amino acid at position 72 is selenocysteine (Sec)
ARLLQASCLLSLLLAGFVSQSRGQEKSKMDCHGGISGTIYEYGALTIDGEEYIPFKQYAGKYVLFVNVASYXGLTGQYIELNALQEELAPFGLVILGFPCNQFGKQEPGENSEILPTLKYVRPGGGFVPNFQLFEKGDVNGEKEQKFYTFLKNSCPPTSELLGTSDRLFWEPMKVHDIRWNFEKFLVGPDGIPIMRWHHRTTVSNVKMNILSYMRRQAALGVKRK

SEQ ID NO: 329 - protein, 225 aa, Artificial Sequence
  Artificial mutant polypeptide
  MUTAGEN (67)..(67)
  BINDING (72)..(72): Selenium
  SITE (72)..(72): Amino acid at position 72 is selenocysteine (Sec)
ARLLQASCLLSLLLAGFVSQSRGQEKSKMDCHGGISGTIYEYGALTIDGEEYIPFKQYAGKYVLFVDVASYXGLTGQYIELNALQEELAPFGLVILGFPCNQFGKQEPGENSEILPTLKYVRPGGGFVPNFQLFEKGDVNGEKEQKFYTFLKNSCPPTSELLGTSDRLFWEPMKVHDIRWNFEKFLVGPDGIPIMRWHHRTTVSNVKMDILSYMRRQAALGVKRK

SEQ ID NO: 330 - protein, 225 aa, Artificial Sequence
  Artificial mutant polypeptide
  MUTAGEN (82)..(82)
  BINDING (72)..(72): Selenium
  SITE (72)..(72): Amino acid at position 72 is selenocysteine (Sec)
ARLLQASCLLSLLLAGFVSQSRGQEKSKMDCHGGISGTIYEYGALTIDGEEYIPFKQYAGKYVLFVNVASYXGLTGQYIELDALQEELAPFGLVILGFPCNQFGKQEPGENSEILPTLKYVRPGGGFVPNFQLFEKGDVNGEKEQKFYTFLKNSCPPTSELLGTSDRLFWEPMKVHDIRWNFEKFLVGPDGIPIMRWHHRTTVSNVKMDILSYMRRQAALGVKRK

SEQ ID NO: 331 - protein, 225 aa, Artificial Sequence
  Artificial mutant polypeptide
  MUTAGEN (101)..(101)
  BINDING (72)..(72): Selenium
  SITE (72)..(72): Amino acid at position 72 is selenocysteine (Sec)
ARLLQASCLLSLLLAGFVSQSRGQEKSKMDCHGGISGTIYEYGALTIDGEEYIPFKQYAGKYVLFVNVASYXGLTGQYIELNALQEELAPFGLVILGFPCDQFGKQEPGENSEILPTLKYVRPGGGFVPNFQLFEKGDVNGEKEQKFYTFLKNSCPPTSELLGTSDRLFWEPMKVHDIRWNFEKFLVGPDGIPIMRWHHRTTVSNVKMDILSYMRRQAALGVKRK

SEQ ID NO: 332 - protein, 225 aa, Artificial Sequence
  Artificial mutant polypeptide
  MUTAGEN (111)..(111)
  BINDING (72)..(72): Selenium
  SITE (72)..(72): Amino acid at position 72 is selenocysteine (Sec)
ARLLQASCLLSLLLAGFVSQSRGQEKSKMDCHGGISGTIYEYGALTIDGEEYIPFKQYAGKYVLFVNVASYXGLTGQYIELNALQEELAPFGLVILGFPCNQFGKQEPGEDSEILPTLKYVRPGGGFVPNFQLFEKGDVNGEKEQKFYTFLKNSCPPTSELLGTSDRLFWEPMKVHDIRWNFEKFLVGPDGIPIMRWHHRTTVSNVKMDILSYMRRQAALGVKRK

SEQ ID NO: 333 - protein, 225 aa, Artificial Sequence
  Artificial mutant polypeptide
  MUTAGEN (130)..(130)
  BINDING (72)..(72): Selenium
  SITE (72)..(72): Amino acid at position 72 is selenocysteine (Sec)
ARLLQASCLLSLLLAGFVSQSRGQEKSKMDCHGGISGTIYEYGALTIDGEEYIPFKQYAGKYVLFVNVASYXGLTGQYIELNALQEELAPFGLVILGFPCNQFGKQEPGENSEILPTLKYVRPGGGFVPDFQLFEKGDVNGEKEQKFYTFLKNSCPPTSELLGTSDRLFWEPMKVHDIRWNFEKFLVGPDGIPIMRWHHRTTVSNVKMDILSYMRRQAALGVKRK

SEQ ID NO: 334 - protein, 225 aa, Artificial Sequence
  Artificial mutant polypeptide
  MUTAGEN (140)..(140)
  BINDING (72)..(72): Selenium
  SITE (72)..(72): Amino acid at position 72 is selenocysteine (Sec)
ARLLQASCLLSLLLAGFVSQSRGQEKSKMDCHGGISGTIYEYGALTIDGEEYIPFKQYAGKYVLFVNVASYXGLTGQYIELNALQEELAPFGLVILGFPCNQFGKQEPGENSEILPTLKYVRPGGGFVPNFQLFEKGDVDGEKEQKFYTFLKNSCPPTSELLGTSDRLFWEPMKVHDIRWNFEKFLVGPDGIPIMRWHHRTTVSNVKMDILSYMRRQAALGVKRK

SEQ ID NO: 335 - protein, 225 aa, Artificial Sequence
  Artificial mutant polypeptide
  MUTAGEN (153)..(153)
  BINDING (72)..(72): Selenium
  SITE (72)..(72): Amino acid at position 72 is selenocysteine (Sec)
ARLLQASCLLSLLLAGFVSQSRGQEKSKMDCHGGISGTIYEYGALTIDGEEYIPFKQYAGKYVLFVNVASYXGLTGQYIELNALQEELAPFGLVILGFPCNQFGKQEPGENSEILPTLKYVRPGGGFVPNFQLFEKGDVNGEKEQKFYTFLKDSCPPTSELLGTSDRLFWEPMKVHDIRWNFEKFLVGPDGIPIMRWHHRTTVSNVKMDILSYMRRQAALGVKRK

SEQ ID NO: 336 - protein, 225 aa, Artificial Sequence
  Artificial mutant polypeptide
  MUTAGEN (181)..(181)
  BINDING (72)..(72): Selenium
  SITE (72)..(72): Amino acid at position 72 is selenocysteine (Sec)
ARLLQASCLLSLLLAGFVSQSRGQEKSKMDCHGGISGTIYEYGALTIDGEEYIPFKQYAGKYVLFVNVASYXGLTGQYIELNALQEELAPFGLVILGFPCNQFGKQEPGENSEILPTLKYVRPGGGFVPNFQLFEKGDVNGEKEQKFYTFLKNSCPPTSELLGTSDRLFWEPMKVHDIRWDFEKFLVGPDGIPIMRWHHRTTVSNVKMDILSYMRRQAALGVKRK

SEQ ID NO: 337 - protein, 225 aa, Artificial Sequence
  Artificial mutant polypeptide
  MUTAGEN (205)..(205)
  BINDING (72)..(72): Selenium
  SITE (72)..(72): Amino acid at position 72 is selenocysteine (Sec)
ARLLQASCLLSLLLAGFVSQSRGQEKSKMDCHGGISGTIYEYGALTIDGEEYIPFKQYAGKYVLFVNVASYXGLTGQYIELNALQEELAPFGLVILGFPCNQFGKQEPGENSEILPTLKYVRPGGGFVPNFQLFEKGDVNGEKEQKFYTFLKNSCPPTSELLGTSDRLFWEPMKVHDIRWNFEKFLVGPDGIPIMRWHHRTTVSDVKMDILSYMRRQAALGVKRK

SEQ ID NO: 338 - protein, 105 aa, Homo sapiens
MVKQIESKTAFQEALDAAGDKLVVVDFSATWCGPCKMIKPFFHSLSEKYSNVIFLEVDVDDCQDVASECEVKCMPTFQFFKKGQKVGEFSGANKEKLEATINELV

SEQ ID NO: 339 - protein, 81 aa, Homo sapiens
MPVIEPIEGGYRVTVGSVEHPMLPEHYIQWIELLTPTDVLRHELKPGEKPEAIFLTNAEAKDVTAREYCNLHGLWKGVIEG

SEQ ID NO: 340 - protein, 745 aa, Homo sapiens
MGVPFFSSLRCMVDLGPCWAGGLTAEMKLLLALAGLLAILATPQPSEGAAPAVLGEVDTSLVLSSMEEAKQLVDKAYKERRESIKQRLRSGSASPMELLSYFKQPVAATRTAVRAADYLHVALDLLERKLRSLWRRPFNVTDVLTPAQLNVLSKSSGCAYQDVGVTCPEQDKYRTITGMCNNRRSPTLGASNRAFVRWLPAEYEDGFSLPYGWTPGVKRNGFPVALARAVSNEIVRFPTDQLTPDQERSLMFMQWGQLLDHDLDFTPEPAARASFVTGVNCETSCVQQPPCFPLKIPPNDPRIKNQADCIPFFRSCPACPGSNITIRNQINALTSFVDASMVYGSEEPLARNLRNMSNQLGLLAVNQRFQDNGRALLPFDNLHDDPCLLTNRSARIPCFLAGDTRSSEMPELTSMHTLLLREHNRLATELKSLNPRWDGERLYQEARKIVGAMVQIITYRDYLPLVLGPTAMRKYLPTYRSYNDSVDPRIANVFTNAFRYGHTLIQPFMFRLDNRYQPMEPNPRVPLSRVFFASWRVVLEGGIDPILRGLMATPAKLNRQNQIAVDEIRERLFEQVMRIGLDLPALNMQRSRDHGLPGYNAWRRFCGLPQPETVGQLGTVLRNLKLARKLMEQYGTPNNIDIWMGGVSEPLKRKGRVGPLLACIIGTQFRKLRDGDRFWWENEGVFSMQQRQALAQISLPRIICDNTGITTVSKNNIFMSNSYPRDFVNCSTLPALNLASWREAS

SEQ ID NO: 341 - protein, 522 aa, Homo sapiens
MALLPRALSAGAGPSWRRAARAFRGFLLLLPEPAALTRALSRAMACRQEPQPQGPPPAAGAVASYDYLVIGGGSGGLASARRAAELGARAAVVESHKLGGTCVNVGCVPKKVMWNTAVHSEFMHDHADYGFPSCEGKFNWRVIKEKRDAYVSRLNAIYQNNLTKSHIEIIRGHAAFTSDPKPTIEVSGKKYTAPHILIATGGMPSTPHESQIPGASLGITSDGFFQLEELPGRSVIVGAGYIAVEMAGILSALGSKTSLMIRHDKVLRSFDSMISTNCTEELENAGVEVLKFSQVKEVKKTLSGLEVSMVTAVPGRLPVMTMIPDVDCLLWAIGRVPNTKDLSLNKLGIQTDDKGHIIVDEFQNTNVKGIYAVGDVCGKALLTPVAIAAGRKLAHRLFEYKEDSKLDYNNIPTVVFSHPPIGTVGLTEDEAIHKYGIENVKTYSTSFTPMYHAVTKRKTKCVMKMVCANKEEKVVGIHMQGLGCDEMLQGFAVAVKMGATKADFDNTVAIHPTSSEELVTLR
